(19) United States
(12) Patent Application Publication
(10) Pub. No.: US 2005/0136465 A1
(43) Pub. Date: Jun. 23, 2005

(54) Screening assays

(76) Inventors: Roger G. Clerc, Binningen (CH); Guillemette Duchateau-Nguyen, Riedisheim (FR); Christophe Gardes, Bartenheim (FR); Jacques Mizrahi, Bottmingen (CH); Claes-Goran Ostenson, Stockholm (SE)

Correspondence Address: HOFFMANN-LA ROCHE INC.;PATENT LAW DEPARTMENT, 340 KINGSLAND STREET, NUTLEY, NJ, 07110, US

(21) Appl. No.: 11/019,829

(22) Filed: Dec. 22, 2004

(30) Foreign Application Priority Data
Dec. 22, 2003 (EP) 03104902.6

(51) Int. Cl. C12Q 1/68

(52) U.S. Cl. 435/6

(57) ABSTRACT

The present invention relates to novel targets for identifying compounds that may be useful for the prevention and treatment of obesity.

[0001] Multifactorial diseases such as obesity are caused by mutations in more than one gene with a large contribution from environmental factors. There has been spectacular success in identifying the genes responsible for Mendelian disorders, whereas finding the susceptibility genes involved in multifactorial diseases has so far been difficult. The evidence suggests that humans inherit a genetic predisposition to gain weight on a high fat diet. Therefore optimizing patient sampling for the collection of tissues on the bases of clinical and physiological parameters is critical.

[0002] There is clearly an unmet medical need for novel therapeutic solutions to this health problem, in particular in the light of the fact that current medication that promote weight loss are transient as the lost excess of weight is gained back within 1 to 5 years. Therefore, there is a need to identify new targets for the development of new treatments.

### SUMMARY OF THE INVENTION

[0003] The invention provides methods (also referred to herein as “screening assays”) for identifying compounds which can be used for the modulation of body weight, e.g., for the treatment of a body weight disorder by detecting the effect of a test compound on the expression of the genes set forth in Seq ID Nos. 1-12 and 25-85 and/or the effect on the level of activity of the polypeptides set forth in Seq ID Nos. 13-24 and 86-146.

### DETAILED DESCRIPTION OF THE INVENTION

[0004] A set of 8000 patients, enrolled in a Diabetes/Obesity Prevention Program with the Stockholm Prevention Program, was monitored for a number of clinical parameters and vital signs. From this large pool of patients, a clinically well annotated series of tissue biopsies from 10 obese, non diabetic, and 10 matched control patients were analyzed for gene expression profiling. The following matched clinical parameters and vital signs were, among others, used to recruit these patients: BMI (control mean=22.2 sd±1.3 and case mean=32.8 sd±2.1), age (control mean=54.6 years and case mean=56.3 years), male gender, VO2 ratio, total fat versus truncal fat, waist-hip ratio, energy expediture, blood pressure, FA oxidation. CHO oxydation, OGTT negative, birth weight, no diabetes in the family, no smoking, sedentary and no alcohol habits.

TABLE 1

| Obese | Control |
|---|---|
| BMI 30-35 | BMI 20-23 |
| without impaired OGTT | without impaired OGTT |
| without type 2 diabetes | without type 2 diabetes |

[0005] Other parameters used for patient selection:
[0006] family history of diabetes
[0007] birth weight
[0008] blood pressure
[0009] medication (if any)
[0010] food intake
[0011] physical activity education
[0012] bodyweight history
[0013] chronic illness
[0014] tobacco and alcohol use
[0015] housing conditions
[0016] socio-economical factors

[0017] The methods provided by this invention entail identifying candidate or test compounds or agents (e.g., peptides, peptidomimetics, small molecules or other drugs) which bind a polypeptide selected from the group consisting of the polypeptides of Seq ID No. 13 to 24, or a polypeptide selected from the group consisting of the polypeptides of Seq ID No.86 to 146 and/or have a stimulatory or inhibitory effect on the activity or the expression of a polypeptide selected from the group consisting of the polypeptides of Seq ID No. 13 to 24, or a polypeptide selected from the group consisting of the polypeptides of Seq ID No. 86 to 146 and then determining which of the compounds that bind a polypeptide selected from the group consisting of the polypeptides of Seq ID No. 13 to 24 or a polypeptide selected from the group consisting of the polypeptides of Seq ID No.86 to 146 or have a stimulatory or inhibitory effect on the activity or the expression of a polypeptide selected from the group consisting of the polypeptides of Seq ID No. 13 to 24 or a polypeptide selected from the group consisting of the polypeptides of Seq ID No.86 to 146 have an effect on the feeding behavior, body weight, or metabolic rate of a mammal (e.g., a mouse or a rat) in an in vivo assay.

[0018] The present invention pertains to a method of screening for compounds that reduce and/or prevent obesity comprising: a) contacting a cell expressing a gene listed in table 2 with a compound; and b) measuring the expression of said gene, or a polypeptide encoded by said gene; wherein a compound which up-regulates expression is a compound which causes an increase of expression of said gene or of the polypeptide encoded by said gene.

[0019] The term “up-regulation of expression” as used herein refers to an increase in expression of mRNA levels of a nucleic acid, or to an increase in expression of polypeptide levels. This term may also relate to increased post-translational modifications that are necessary for the activity and/or function of a polypeptide, e.g. addition of sugar moieties, phosphorylation etc.

[0020] A cell used in the method hereinbefore described, or in any of the methods hereinafter described may be an adipocyte, or a host or host cell as defined hereinafter.

[0021] Preferably, said gene is Seq ID. No.1. In another preferred embodiment, said gene is Seq ID No. 2. In another preferred embodiment, said gene is Seq ID No. 3. In another preferred embodiment, said gene is Seq ID No. 4. In another preferred embodiment, said gene is Seq ID No. 5. In another preferred embodiment, said gene is Seq ID No. 6.

[0022] The present invention further provides a method of screening for compounds that reduce and/or prevent obesity comprising: a) contacting a cell expressing a gene selected from the group consisting of Seq ID No. 25-37 with a compound; and b) measuring the expression of said gene, or a polypeptide encoded by said gene;
[0023] wherein a compound which up-regulates gene expression is a compound which causes an increase of expression of said gene or of the polypeptide encoded by said gene.

[0024] Preferably, said polypeptide is Seq ID No. 13. In another preferred embodiment, said polypeptide is Seq ID No. 14. In another preferred embodiment, said polypeptide is Seq ID No. 15. In another preferred embodiment, said polypeptide is Seq ID No. 16. In another preferred embodiment, said polypeptide is Seq ID No. 17. In another preferred embodiment, said polypeptide is Seq ID No. 18.

[0025] The present invention also pertains to a method of screening for compounds that reduce and/or prevent obesity comprising a) contacting a cell expressing a gene listed in table 3 with a compound; and b) measuring the expression of said gene, or a polypeptide encoded by said gene;
[0026] wherein a compound which down-regulates gene expression is a compound which causes a decrease of said gene or a polypeptide encoded by said gene.

[0027] The term “down-regulation of expression” as used herein refers to a decrease in expression of mRNA levels of a nucleic acid, or to a decrease in expression of polypeptide levels. This term may also relate to decreased post-translational modifications that are necessary for the activity and/or function of a polypeptide, e.g. addition of sugar moieties, phosphorylation etc.

[0028] Preferably, said gene is Seq ID. No.7. In another preferred embodiment, said gene is Seq ID No. 8. In another preferred embodiment, said gene is Seq ID No. 9. In another preferred embodiment, said gene is Seq ID No. 10. In another preferred embodiment, said gene is Seq ID No. 11. In another preferred embodiment, said gene is Seq ID No. 12.

[0029] Preferably, said polypeptide is Seq ID. No.19. In another preferred embodiment, said polypeptide is Seq ID No. 20. In another preferred embodiment, said polypeptide is Seq ID No. 21. In another preferred embodiment, said polypeptide is Seq ID No. 22. In another preferred embodiment, said polypeptide is Seq ID No. 23. In another preferred embodiment, said polypeptide is Seq ID No. 24.

[0030] The present invention further provides a method of screening for compounds that reduce and/or prevent obesity comprising: a) contacting a cell expressing a gene selected from the group consisting of Seq ID No. 38 to 85 with a compound; and b) measuring the expression of said gene, or a polypeptide encoded by said gene;
[0031] wherein a compound which down-regulates gene expression is a compound which causes a decrease of said gene or a polypeptide encoded by said gene.

[0032] The present invention provides a method of screening for compounds that reduce and/or prevent obesity comprising: a) contacting a polypeptide selected from the group consisting of Seq ID No. 13 to 18 with a compound; and b) determining and/or measuring the activity of said polypeptide; wherein a compound which reduces and/or prevents obesity by agonizing said polypeptide is a compound which causes an increase in activity of said polypeptide.

[0033] The present invention also pertains to a method for screening of compounds that reduce and/or prevent obesity comprising: a) contacting a cell expressing a nucleic acid encoding a polypeptide selected from the group consisting of Seq ID No. 13 to 18 with a compound; and b) determining the activity of said polypeptide; wherein a compound which reduces and/or prevents obesity by agonizing said polypeptide is a compound which causes an increase in activity of said polypeptide.

[0034] Preferably, said polypeptide is Seq ID. No.13. In another preferred embodiment, said polypeptide is Seq ID No. 14. In another preferred embodiment, said polypeptide is Seq ID No. 15. In another preferred embodiment, said polypeptide is Seq ID No. 16. In another preferred embodiment, said polypeptide is Seq ID No. 17. In another preferred embodiment, said polypeptide is Seq ID No. 18.

[0035] The terms “activity ” as used with respect to the polypeptide encoded by Seq ID No. 1, AZGP1, refers to the lipolytic and lipid mobilizing activity of AZGP1. Assays to determine these activities are well known in the art and are e.g. described in W099/62939.

[0036] The terms “activity ” as used with respect to the polypeptide encoded by Seq ID No. 2, IRS 1, refers to modifications of IRS1, eg. by phosphorylation, preferably by tyrosine phosphorylation, and/or binding to downstream effectors following activation, eg. binding to PI3-kinase, Syp or Grb2, and/or phosphorylation or activation of downstream effectors of IRS1 activation. Assays to measure the activity of IRSI are well known in the art, and are, for example, described in Ridderstrale et al., J. Biol. Chem. 270, 3471, 1995; or Kuhne et al., J. Biol. Chem. 268, 11479-81, 1993.

[0037] The terms “activity ” as used with respect to the polypeptide encoded by Seq ID No. 3, ApoAI, refers to the binding of ApoAl and/or lipid vesicles containing ApoAl to target cells and/or the ability of ApoAl and/or lipid vesicles containing ApoAl to induce efflux of cellular cholesterol and phospholipids. Assays to determine these activities are well known in the art and are e.g. described in Hauser et al., Biochemistry 1998, 37, 17843-17850; Yancey et al., Biochemistry 1995, 34, 7955-7965.

[0038] The terms “activity ” as used with respect to the polypeptide encoded by Seq ID No. 4, ARNT, refers to the transcriptional and/or co-activating activity of ARNT. Assays to determine these activities are well known in the art and are e.g. described in Whitelaw et al., Mol. Cell Biol. 12, 1994, 8343-8355 and/or Brunnberg et al., Proc. Natl. Acad. Sci. USA 100, 2003, 6517-6522.

[0039] The terms “activity ” as used with respect to the polypeptide encoded by Seq ID No. 5, creatine kinase from brain (CKB), refers to the kinase activity of CKB. Assays to determine these activities are well known in the art and are e.g. described in O'Gorman et al., Biochem. Biophys. Acta 1276, 1996, 161-170; and/or Durany et al., Mol. Pathol. 55, 2002, 242-249.

[0040] The terms “activity ” as used with respect to the polypeptide encoded by Seq ID No. 6, 6 sterol-c5-desaturase, refers to the ability of 6 sterol-c5-desaturase to desaturate n-3 and n-6 fatty acids. Assays to determine these activities are well known in the art and are e.g. described in de Antueno et al., FEBS Letters 509, 2001, 77-80; de Antueno et al., FEBS Letters 491, 2001, 247-251; Taton et al., Biochemistry 39, 2000, 701-711.

[0041] The present invention also pertains to a method of screening for compounds that reduce and/or prevent obesity comprising: a) contacting a polypeptide selected from the group consisting of Seq ID No. 86 to 98 with a compound; and b) determining the activity of said polypeptide;
[0042] wherein a compound which reduces and/or prevents obesity by agonizing said polypeptide is a compound which causes an increase in activity of said polypeptide.

[0043] A method for screening of compounds that reduce and/or prevent obesity comprising: a) contacting a cell expressing a nucleic acid encoding a polypeptide selected from the group consisting of Seq ID No. 86 to 98 with a compound; and b) determining the activity of said polypeptide;
[0044] wherein a compound which reduces and/or prevents obesity by agonizing said polypeptide is a compound which causes an increase in activity of said polypeptide.

[0045] The present invention pertains to a method for screening of compounds that reduce and/or prevent obesity comprising: a) contacting a cell expressing a polypeptide selected from the group consisting of Seq ID No. 19 to 24 with a compound; and b) determining the activity of said gene, or a polypeptide encoded by said gene; wherein a compound which reduces and/or prevents obesity by antagonizing said polypeptide is a compound which causes a decrease in activity of said polypeptide.

[0046] The present invention provides a method for screening of compounds that reduce and/or prevent obesity comprising: a) contacting a cell expressing a nucleic acid encoding a polypeptide selected from the group consisting of Seq ID No. 19 to 24 with a compound; and b) determining the activity of said polypeptide; wherein a compound which reduces and/or prevents obesity by antagonizing said polypeptide is a compound which causes a decrease in activity of said polypeptide.

[0047] Preferably, said polypeptide is Seq ID. No.19. In another preferred embodiment, said polypeptide is Seq ID No. 20. In another preferred embodiment, said polypeptide is Seq ID No. 21. In another preferred embodiment, said polypeptide is Seq ID No. 22. In another preferred embodiment, said polypeptide is Seq ID No. 23. In another preferred embodiment, said polypeptide is Seq ID No. 24.

[0048] The terms “activity ” as used with respect to the polypeptide encoded by Seq ID No. 7, osteomodulin (osteoadherin), refers to the ability of osteomodulin to mediate cell adhesion and/or attachment. Assays to determine these activities are well known in the art and are e.g. described in Wendel et al., J. Cell Biol. 141, 1998, 839-847.

[0049] The terms “activity ” as used with respect to the polypeptide encoded by Seq ID No. 8, VLDLR (Very Low Density Lipoprotein Receptor), refers to the ability of VLDLR to e.g. bind bind to ligands such as proteinases, apolipoproteins, extracellular proteins. Assays to determine these activities are well known in the art and are e.g. described in Rettenberger et al., J. Biol. Chem. 274, 1999, 8973-8980, which also lists references for binding assays for ligands including serine proteinase-serpin complexes, the pro-enzyme form of uPA, ApoE containing lipoproteins, apo(a), lipoprotein lipase and thrombospondin-1.

[0050] The terms “activity ” as used with respect to the polypeptide encoded by Seq ID No. 9,11-beta-hydroxysteroid dehydrogenase type 1 (HSD11B1), refers to dehydrogenase and/or reductase activities of HSD11B1. Assays to determine these activities are well known in the art and are e.g. described in Bujalska, I. J. et al., J. Clin. Endocrinol. Metab. 2002, 87, 1205-1210.

[0051] The terms “activity ” as used with respect to the polypeptide encoded by Seq ID No. 10, reelin, refers to the ability of reelin to bind to receptors, e.g. VLDLR or ApoER2, or to induce phosphorylation of downstream signaling molecules, e.g. Disabled 1. Assays to determine these activities are well known in the art and are e.g. described in D'Arcangelo, G. et al., Neuron 1999, 24, 471-479, and Howell, B. W. et al., Genes Dev. 1999, 13, 643-648.

[0052] The terms “activity ” as used with respect to the polypeptide encoded by Seq ID No. 11, Multidrug resistance protein 7 (MRP7, ABCC10), refers to the transporter activities of ABCC10. Assays to determine these activities are well known in the art and are e.g. described in Mol. Pharmacol. 2003, 63, 351-358.

[0053] The terms “activity ” as used with respect to the polypeptide encoded by Seq ID No. 12, cyclophilin 40 (CyP40), refers to the ability of CyP40 to bind to other chaperones, e.g. Hsp90, and to its chaperone activity. Assays to determine these activities are well known in the art and are e.g. described in Ward, B.K., et al., J. Biol. Chem. 2002, 277, 40799-40809, and Freeman B. C. et al., Science 1996, 274, 1718-1720.

[0054] The present invention provides a method of screening for compounds that reduce and/or prevent obesity comprising: a) contacting a polypeptide selected from the group consisting of Seq ID No. 99 to 146 with a compound; and b) determining the activity of said polypeptide;
[0055] wherein a compound which reduces and/or prevents obesity by antagonizing said polypeptide is a compound which causes a decrease in activity of said polypeptide.

[0056] The present invention further provides a method for screening of compounds that reduce and/or prevent obesity comprising: a) contacting a cell expressing a nucleic acid encoding a polypeptide selected from the group consisting of Seq ID No. 99 to 146 with a compound; and b) determining the activity of said polypeptide;
[0057] wherein a compound which reduces and/or prevents obesity by antagonizing said polypeptide is a compound which causes a decrease in activity of said polypeptide.

[0058] The present invention also provides a method of screening for compounds that bind to a polypeptide selected from the group consisting of the polypeptides of Seq ID No. 13 to 24, comprising the steps of a) contacting a compound with said polypeptide; and b) determining the ability of said compound to bind to said polypeptide.

[0059] The present invention provides a method of screening for compounds that bind to a polypeptide selected from the group consisting of the polypeptides of Seq ID No. 86 to 146, comprising the steps of a) contacting a compound with said polypeptide; and b) determining the ability of said compound to bind to said polypeptide.

[0060] Candidate or test compounds or agents which bind a polypeptide selected from the group consisting of Seq ID No 13 to 24 or a polypeptide selected from the group consisting of Seq ID No 86 to 146 and/or have a stimulatory or inhibitory effect on the activity or the expression of said polypeptide are identified in assays that employ either cells which express a form of said polypeptide (cell-based assays) or isolated polypeptide (cell-free assays). The various assays can employ a variety of forms of said polypeptide (e.g., full-length polypeptide, a biologically active fragment of a polypeptide, or a fusion protein which includes all or a portion of said polypeptide). Moreover, the polypeptide can be derived from any suitable mammalian species. The assay can be a binding assay entailing direct or indirect measurement of the binding of a test compound or the polypeptide to a known ligand or receptor, as defined above. The assay can also be an activity assay entailing direct or indirect measurement of the activity of said polypeptide. The assay can also be an expression assay entailing direct or indirect measurement of the expression of said polypeptide (e.g., polypeptide- encoding mRNA or the polypeptide). The various screening assays are combined with an in vivo assay entailing measuring the effect of the test compound on the feeding behavior, body weight, or metabolic rate of a mammal (e.g., a mouse or a rat).

[0061] In another embodiment, the assay is a cell-based assay comprising contacting a cell expressing a polypeptide (e.g., full-length polypeptide, a biologically active fragment of said polypeptide, or a fusion protein which includes all or a portion of said polypeptide) with a test compound and determining the ability of the test compound to modulate (e.g., stimulate or inhibit) the activity of the polypeptide. Determining the ability of the test compound to modulate the activity of the said polypeptide can be accomplished by any method suitable for measuring the activity of said polypeptide.

[0062] The present invention also includes cell-free assays. Such assays involve contacting a form of a polypeptide selected from the group consisting of Seq ID No 13 to 24 or a polypeptide selected from the group consisting of Seq ID No 86 to 146 (e.g., full-length polypeptide, a biologically active fragment of said polypeptide, or a fusion protein comprising all or a portion of said polypeptide) with a test compound and determining the ability of the test compound to bind to said polypeptide. Binding of the test compound to said polypeptide can be determined either directly or indirectly as described above. In one embodiment, the assay includes contacting the said polypeptide with a known compound which binds said polypeptide to form an assay mixture, contacting the assay mixture with a test compound, and determining the ability of the test compound to interact with said polypeptide, wherein determining the ability of the test compound to interact with said polypeptide comprises determining the ability of the test compound to preferentially bind to the said polypeptide as compared to the known compound.

[0063] The cell-free assays of the present invention are amenable to use of either a membrane-bound form of a polypeptide or a soluble fragment thereof. In the case of cell-free assays comprising the membrane-bound form of the polypeptide, it may be desirable to utilize a solubilizing agent such that the membrane-bound form of the polypeptide is maintained in solution. Examples of such solubilizing agents include non-ionic detergents such as n-octylglucoside, n-dodecylglucoside, n-dodecylmaltoside, octanoyl-N-mcthylglucamidc, decanoyl-Nmethylglucamide, Triton X-100, Triton X-114, Thesit, Isotridecypoly(ethylene glycol ether)n, 3-[(3-cholamidopropyl)dimethylamminio]-1-propane sulfonate (CHAPS), 3-[(3-cholamidopropyl)dimethylamminio]-2-hydroxy-1-propane sulfonate (CHAPSO), or N-dodecyl-N, N-dimethyl-3-ammonio-1-propane sulfonate.

[0064] In various embodiments of the above assay methods of the present invention, it may be desirable to immobilize a polypeptide to facilitate separation of complexed from uncomplexed forms of the polypeptide with a binding molecule, as well as to accommodate automation of the assay. Binding of a test compound to a polypeptide, or interaction of a polypeptide with a binding molecule in the presence and absence of a candidate compound, can be accomplished in any vessel suitable for containing the reactants. Examples of such vessels include microtitre plates, test tubes, and micro-centrifuge tubes. In one embodiment, a fusion protein can be provided which adds a domain that allows one or both of the proteins to be bound to a matrix. For example, glutathione-S-transferase fusion proteins can be adsorbed onto glutathione sepharose beads (Sigma Chemical; St. Louis, Mo.) or glutathione derivatized microtitre plates, which are then combined with the test compound or the test compound and either the non-adsorbed binding protein or polypeptide, and the mixture incubated under conditions conducive to complex formation (e.g., at physiological conditions for salt and pH). Following incubation, the beads or microtitre plate wells are washed to remove any unbound components and complex formation is measured either directly or indirectly, for example, as described above. Alternatively, the complexes can be dissociated from the matrix, and the level of binding or activity of a polypeptide hereinbefore described can be determined using standard techniques.

[0065] j Other techniques for immobilizing proteins on matrices can also be used in the screening assays of the invention. For example, either a polypeptide hereinbefore described or its binding molecule can be immobilized utilizing conjugation of biotin and streptavidin. Biotinylated polypeptide of the invention or target molecules can be prepared from biotin-NHS (N-hydroxy-succinimide) using techniques well known in the art (e.g., biotinylation kit, Pierce Chemicals; Rockford, Ill.), and immobilized in the wells of streptavidin-coated 96 well plates (Pierce Chemical). Alternatively, antibodies reactive with a polypeptide or binding molecules, but which do not interfere with binding of the polypeptide of the invention to its binding molecule, can be derivatized to the wells of the plate. Unbound binding protein or polypeptide of the invention is trapped in the wells by antibody conjugation. Methods for detecting such complexes, in addition to those described above for the GST-immobilized complexes, include immunodetection of complexes using antibodies reactive with a polypeptide hereinbefore described or binding molecule, as well as enzyme-linked assays which rely on detecting an enzymatic activity associated with a polypeptide or binding molecule.

I. Test Compounds

[0066] Suitable test compounds for use in the screening assays of the invention can be obtained from any suitable source, e.g., conventional compound libraries. The test compounds can also be obtained using any of the numerous approaches in combinatorial library methods known in the art, including biological libraries; spatially addressable parallel solid phase or solution phase libraries; synthetic library methods requiring deconvolution; the “one-bead one-compound” library method; and synthetic library methods using affinity chromatography selection. The biological library approach is limited to peptide libraries, while the other four approaches are applicable to peptide, non-peptide oligomer or small molecule libraries of compounds (Lam (1997) Anticancer Drug Des. 12:145).

[0067] Examples of methods for the synthesis of molecular libraries can be found in the art, for example in: DeWitt et al. (1993) Proc. Natl. Acad. Sci. USA 90:6909; Erb Ct al. (1994) Proc. Natl. Acad. Sci. USA 91:11422; Zuckermann et al. (1994). J. Med. Chem. 37:2678; Cho et al. (1993) Science 261:1303; Carrell et al. (1994) Angew Chem. Int. Ed. Engl. 33:2059; Carell et al. (1994) Angew Chem. Int. Ed. Engi.33:2061; and Gallop et al. (1994) J. Med. Chem. 37:1233.

[0068] Libraries of compounds may be presented in solution (e.g., Houghten (1992) BioTechniques 13.412-421), or on beads (Lam (1991) Nature 354:82-84), chips (Fodor (1993) Nature 364:555-556), bacteria (U.S. Pat. No.5,223,409), spores (U.S. Pat. Nos. 5,571,698; 5,403,484; and 5,223, 409), plasmids (Cull et al. (1992) Proc. Natl. Acad. Sci. USA 89.1865-1869) or phage (Scott and Smith (1990) Science249:386-390; Devlin (1990) Science 249:404-406; Cwirla et al. (1990) Proc. Natl. Acad. Sci. USA 87:6378-6382; and Felici (1991) J. Mol. Biol. 222:301-310).

[0069] The present invention provides a compound identified by any of the methods hereinbefore described.

II. Isolated Nucleic Acid Molecules

[0070] One aspect of the invention pertains to isolated nucleic acid molecules that encode a polypeptide selected from the group consisting of Seq ID No. 13 to 24 a polypeptide selected from the group consisting of Seq ID No 86 to 146 or a biologically active portion thereof, as well as nucleic acid molecules sufficient for use as hybridization probes to identify nucleic acid molecules encoding a gene selected from the group consisting of Seq ID No. 1 to 12 or a gene selected from the group consisting of Seq ID No 25 to 85 and fragments of such nucleic acid molecules suitable for use as PCR primers for the amplification or mutation of nucleic acid molecules. As used herein, the term “nucleic acid molecule” is intended to include DNA molecules (e.g., cDNA or genomic DNA) and RNA molecules (e.g., mRNA) and analogs of the DNA or RNA generated using nucleotide analogs. The nucleic acid molecule can be single-stranded or double-stranded, but preferably is double-stranded DNA. This section describes the nucleic acids hereinbefore described and methods for making and using such nucleic acids.

[0071] An “isolated” nucleic acid molecule is one which is separated from other nucleic acid molecules which are present in the natural source of the nucleic acid molecule. Preferably, an “isolated” nucleic acid molecule is free of sequences (preferably protein encoding sequences) which naturally flank the nucleic acid (i.e., sequences located at the 5′ and 3′ ends of the nucleic acid) in the genomic DNA of the organism from which the nucleic acid is derived. For example, in various embodiments, the isolated nucleic acid molecule can contain less than about 5 kb, 4 kb, 3 kb, 2 kb, 1 kb, 0.5 kb or 0.1 kb of nucleotide sequences which naturally flank the nucleic acid molecule in genomic DNA of the cell from which the nucleic acid is derived. Moreover, an “isolated” nucleic acid molecule, such as a cDNA molecule, can be substantially free of other cellular material, or culture medium when produced by recombinant techniques, or substantially free of chemical precursors or other chemicals when chemically synthesized.

[0072] A nucleic acid molecule of the present invention can be isolated using standard molecular biology techniques and the sequence information provided herein. Using all or a portion of the nucleic acid sequences selected from the group consisting of Seq ID No. 1 to 12 or a gene selected from the group consisting of Seq ID No 25 to 85 as a hybridization probe, nucleic acid molecules of the invention can be isolated using standard hybridization and cloning techniques (e.g., as described in Sambrook et al., eds., Molecular Cloning: A Laboratory Manual, 2nd ed., Cold Spring Harbor Laboratory, Cold Spring Harbor Laboratory Press, Cold Spring Harbor, N.Y, 1989).

[0073] A nucleic acid molecule of the invention can be amplified using cDNA, mRNA or genomic DNA as a template and appropriate oligonucleotide primers according to standard PCR amplification techniques. The nucleic acid so amplified can be cloned into an appropriate vector and characterized by DNA sequence analysis. Furthermore, oligonucleotides corresponding to all or a portion of a nucleic acid molecule of the invention can be prepared by standard synthetic techniques, e.g., using an automated DNA synthesizer.

[0074] Moreover, a nucleic acid molecule of the invention can comprise only a portion of a nucleic acid sequence encoding a polypeptide selected from the group consisting of Seq ID No. 13 to 24 or a polypeptide selected from the group consisting of Seq ID No 86 to 146, for example, a fragment which can be used as a probe or primer or a fragment encoding a biologically active portion of a polypeptide selected from the group consisting of Seq ID No.13 to 24 or a polypeptide selected from the group consisting of Seq ID No 86 to 146. The nucleotide sequence determined from the cloning of any one of the genes listed in tables 2 and 3 or Seq ID No. 25 to 85 for the generation of probes and primers designed for use in identifying and/or cloning allelic variants and other variants of any one of the genes listed in tables 2 and 3 or Seq ID No. 25 to 85. The probe/primer typically comprises substantially purified oligonucleotide. The oligonucleotide typically comprises a region of nucleotide sequence that hybridizes under stringent conditions to at least about 12, preferably about 25, more preferably about 50, 75, 100, 125, 150, 175, 200, 250, 300, 350 or 400 consecutive nucleotides of the sense or antisense sequence of any one of the genes listed in tables 2 and 3 or Seq ID No. 25 to 85 or naturally occurring mutant or allelic variant thereof.

[0075] Probes based on the sequence of a nucleic acid molecule of the invention can be used to detect transcripts or genomic sequences encoding the same protein molecule encoded by a selected nucleic acid molecule. The probe comprises a label group attached thereto, e.g., a radioisotope, a fluorescent compound, an enzyme, or an enzyme co-factor. Such probes can be used as part of a diagnostic test kit for identifying cells or tissues which miss-express the protein, such as by measuring levels of a nucleic acid molecule encoding the protein in a sample of cells from a subject, e.g., detecting mRNA levels or determining whether a gene encoding the protein has been mutated or deleted.

[0076] A nucleic acid fragment encoding a “biologically active portion” of a polypeptide selected from the group consisting of Seq ID No. 13 to 24 or a polypeptide selected from the group consisting of Seq ID No 86 to 146 can be prepared by isolating a portion of nucleic acid which encodes a polypeptide having a biological activity, expressing the encoded portion of the polypeptide protein (e.g., by recombinant expression in vitro) and assessing the activity of the encoded portion of the polypeptide.

[0077] The invention further encompasses nucleic acid molecules that differ from the nucleotide sequence of a nucleic acid selected from the group consisting of Seq ID No. 1 to 12 or a gene selected from the group consisting of Seq ID No 25 to 85 due to degeneracy of the genetic code and thus encode the same protein as that encoded by the said nucleotide sequence.

[0078] In addition to the nucleotide sequence of any one of Seq ID No. 1 to 12 or a gene selected from the group consisting of Seq ID No 25 to 85, it will be appreciated by those skilled in the art that DNA sequence polymorphisms that lead to changes in the amino acid sequence may exist within a population. Such genetic polymorphisms may exist among individuals within a population due to natural allelic variation. An allele is one of a group of genes which occur alternatively at a given genetic locus. As used herein, the phrase “allelic variant” refers to a nucleotide sequence which occurs at a given locus or to a polypeptide encoded by the nucleotide sequence. Such natural allelic variations can typically result in 1-5% variance in the nucleotide sequence of a given gene. Alternative alleles can be identified by sequencing the gene of interest in a number of different individuals. This can be readily carried out by using hybridization probes to identify the same genetic locus in a variety of individuals. Any and all such nucleotide variations and resulting amino acid polymorphisms or variations that are the result of natural allelic variation and that do not alter the functional activity are intended to be within the scope of the invention.

[0079] Accordingly, in another embodiment, an isolated nucleic acid molecule of the invention is at least 300 (325, 350, 375, 400, 425, 450, 500, 550, 600, 650, 700, 800, 900, 1000, or 1290) nucleotides in length and hybridizes under stringent conditions to the nucleic acid molecule comprising the nucleotide sequence, preferably the coding sequence of any one of the genes listed in table 2 and/or 3 or Seq ID No. 25 to 85 and encodes an allelic variant or mutant of said gene.

[0080] As used herein, the term “hybridizes under stringent conditions” is intended to describe conditions for hybridization and washing under which nucleotide sequences at least 60% (65%, 70%, preferably 75%) identical to each other typically remain hybridized to each other. Such stringent conditions are known to those skilled in the art and can be found in Current Protocols in Molecular Biology, John Wiley & Sons, N.Y (1989), 6.3.1-6.3.6. A preferred, non-limiting example of stringent hybridization conditions are hybridization in 6xsodium chloride/sodium citrate (SSC) at about 45 degrees C., followed by one or more washes in 0.2× SSC, 0.1% SDS at 50-65 degrees C. Preferably, an isolated nucleic acid molecule of the invention that hybridizes under stringent conditions to the sequence selected from the group consisting of Seq ID No. 1 to 12 or a gene selected from the group consisting of Seq ID No 25 to 85, corresponds to a naturally-occurring nucleic acid molecule. As used herein, a “naturally-occurring” nucleic acid molecule refers to an RNA or DNA molecule having a nucleotide sequence that occurs in nature (e.g., encodes a natural protein).

[0081] In addition to naturally occurring allelic variants of any one of the genes listed in tables 2 and 3 or Seq ID No. 25 to 85, the skilled artisan will further appreciate that changes can be introduced by mutation thereby leading to changes in the amino acid sequence of the encoded protein, without altering the biological activity of the protein. For example, one can make nucleotide substitutions leading to amino acid substitutions at “non-essential” amino acid residues. A “non-essential” amino acid residue is a residue that can be altered from the wild-type sequence without altering the biological activity, whereas an “essential” amino acid residue is required for biological activity. For example, amino acid residues that are not conserved or only semi-conserved among homologues of various species may be non-essential for activity and thus would be likely targets for alteration. Alternatively, amino acid residues that are conserved among the homologues of various species (e.g., murine and human) may be essential for activity and thus would not be likely targets for alteration.

[0082] Accordingly, another aspect of the invention pertains to nucleic acid molecules encoding a polypeptide selected from the group consisting of Seq ID No. 13 to 24 or a polypeptide selected from the group consisting of Seq ID No 86 to 146 that contain changes in amino acid residues that are not essential for activity. Such polypeptides differ in amino acid sequence from said polypeptide yet retain biological activity. In one embodiment, the isolated nucleic acid molecule includes a nucleotide sequence encoding a protein that includes an amino acid sequence that is at least about 85%, 95%, 96%, 97%, 98%, or 99% identical to the amino acid sequence of any one of Seq ID No. 13 to 24 or of Seq ID No. 86 to 146.

[0083] An isolated nucleic acid molecule encoding a variant protein can be created by introducing one or more nucleotide substitutions, additions or deletions into the nucleotide sequence of any one of the genes listed in tables 2 and 3 or Seq ID No.25 to 85 such that one or more amino acid substitutions, additions or deletions are introduced into the encoded protein. Mutations can be introduced by standard techniques, such as site-directed mutagenesis and PCR-mediated mutagenesis. Preferably, conservative amino acid substitutions are made at one or more predicted non-essential amino acid residues. A “conservative amino acid substitution” is one in which the amino acid residue is replaced with an amino acid residue having a similar side chain. Families of amino acid residues having similar side chains have been defined in the art. These families include amino acids with basic side chains (e.g., lysine, arginine, histidine), acidic side chains (e.g., aspartic acid, glutamic acid), uncharged polar side chains (e.g., glycine, asparagine, glutamine, serine, threonine, tyrosine, cysteine), nonpolar side chains (e.g., alanine, valine, leucine, isoleucine, proline, phenylalanine, methionine, tryptophan), beta-branched side chains (e.g., threonine, valine, isoleucine) and aromatic side chains (e.g., tyrosine, phenylalanine, tryptophan, histidine). Alternatively, mutations can be introduced randomly along all or part of the coding sequence, such as by saturation mutagenesis, and the resultant mutants can be screened for biological activity to identify mutants that retain activity. Following mutagenesis, the encoded protein can be expressed recombinantly and the activity of the protein can be determined.

[0084] In one embodiment, a mutant polypeptide that is a variant of a polypeptide selected from the group consisting of Seq ID No. 13 to 24 or a polypeptide selected from the group consisting of Seq ID No 86 to 146 can be assayed for (1) the ability to form protein-protein interactions with proteins in a signaling pathway, (2) the ability to bind a ligand of said polypeptide; or (3) the ability to bind to an intracellular binding protein for said polypeptide. In another embodiment, the mutant polypeptide can be assayed for the ability to mediate changes in feeding behavior, body weight, or metabolism.

[0085] J The present invention encompasses antisense nucleic acid molecules, i.e., molecules which are complementary to a sense nucleic acid encoding a polypeptide selected from the group consisting of Seq ID No. 19 to 24 or a polypeptide selected from the group consisting of Seq ID No 99 to 146, e.g., complementary to the coding strand of a double-stranded cDNA molecule or complementary to an mRNA sequence. Accordingly, an antisense nucleic acid can hydrogen bond to a sense nucleic acid. The antisense nucleic acid can be complementary to an entire coding strand, or to only a portion thereof, e.g., all or part of the protein coding region (or open reading frame). An antisense nucleic acid molecule can be antisense to all or part of a noncoding region of the coding strand of a nucleotide sequence encoding a polypeptide selected from the group consisting of Seq ID No. 19 to 24 or a polypeptide selected from the group consisting of Seq ID No 99 to 146. The noncoding regions (“5′ and 3′ untranslated regions”) are the 5′ and 3′ sequences which flank the coding region and are not translated into amino acids.

[0086] An antisense oligonucleotide can be, for example, about 5, 10, 15, 20, 25, 30, 35, 40, 45 or 50 nucleotides in length. An antisense nucleic acid of the invention can be constructed using chemical synthesis and enzymatic ligation reactions using procedures known in the art. For example, an antisense nucleic acid (e.g., an antisense oligonucleotide) can be chemically synthesized using naturally occurring nucleotides or variously modified nucleotides designed to increase the biological stability of the molecules or to increase the physical stability of the duplex formed between the antisense and sense nucleic acids, e.g., phosphorothioate derivatives and acridine substituted nucleotides can be used. Examples of modified nucleotides which can be used to generate the antisense nucleic acid include 5-fluorouracil, 5-bromouracil, 5-chlorouracil, 5-iodouracil, hypoxanthine xanthine, 4-acetylcytosine, 5-(carboxyhydroxylmethyl) uracil, 5-carboxymethylaminomethyl-2-thiouridine, 5-carboxymethylaminomethyluracil, dihydrouracil, beta-D-galactosylqueosine, inosine, N6-isopentenyladenine, 1-methylguanine, 1-methylinosine, 2,2-dimethylguanine 2-methyladenine, 2-methylguanine, 3-methylcytosine, 5-methylcytosine, N6-adenine, 7-methylguanine, 5-methylaminomethyluracil, 5-methoxyaminomethyl-2-thiouracil, beta-D-mannosylqueosine, 5′-methoxycarboxymethyluracil, 5-methoxyuracil, uracil-5-oxyacetic acid (v), wybutoxosine, pseudouracil, queosine, 2-thiocytosine, 5-methyl-2-thiouracil, 2-thiouracil, 4-thiouracil, 5-methyluracil, uracil-5-oxyacetic acid methylester, uracil-5-oxyacetic acid (v), 5-methyl-2-thiotiracil, 3-(3-amino-3-N-2-carboxypropyl) tiracil, (acp3) w, and 2,6-diaminopurine. Alternatively, the antisense nucleic acid can be produced biologically using an expression vector into which a nucleic acid has been subcloned in an antisense orientation (i.e., RNA transcribed from the inserted nucleic acid will be of an antisense orientation to a target nucleic acid of interest, described further in the following subsection).

[0087] The antisense nucleic acid molecules of the invention are typically administered to a subject or generated in situ such that they hybridize with or bind to cellular mRNA and/or genomic DNA encoding uracil to thereby inhibit expression, e.g., by inhibiting transcription and/or translation. The hybridization can be by conventional nucleotide complementarity to form a stable duplex, or, for example, in the case of an antisense nucleic acid molecule which binds to DNA duplexes, through specific interactions in the major groove of the double helix. An example of a route of administration of antisense nucleic acid molecules of the invention includes direct injection at a tissue site. Alternatively, antisense nucleic acid molecules can be modified to target selected cells and then administered systemically. For example, for systemic administration, antisense molecules can be modified such that they specifically bind to receptors or antigens expressed on a selected cell surface, e.g., by linking the antisense nucleic acid molecules to peptides or antibodies which bind to cell surface receptors or antigens. The antisense nucleic acid molecules can also be delivered to cells using the vectors described herein. To achieve sufficient intracellular concentrations of the anti-sense molecules, vector constructs in which the antisense nucleic acid molecule is placed under the control of a strong pol II or pol III promoter are preferred.

[0088] An antisense nucleic acid molecule of the invention can be an a-anomeric nucleic acid molecule. An a-anomeric nucleic acid molecule forms specific double-stranded hybrids with complementary RNA in which, contrary to the usual α-units, the strands run parallel to each other (Gaultier et al. (1987) Nucleic Acids Res. 15:6625-6641). The anti-sense nucleic acid molecule can also comprise a 2′-o-methylribonucleotide (Inolle C et al. (1987) Nucleic Acids Res. 15:6131-6148) or a chimeric RNA-DNA analogue (Inoue et al. (1987) FEBS Lett. 215:327-330).

[0089] The invention also encompasses ribozymes. Ribozymes are catalytic RNA molecules with ribonuclease activity which are capable of cleaving a single-stranded nucleic acid, such as a mRNA, to which they have a complementary region. Thus, ribozymes (e.g., hammerhead ribozymes (described in Haselhoff and Gerlach (1988) Nature 334:585-591)) can be used to catalytically cleave mRNA transcripts to thereby inhibit translation of the protein encoded by the mRNA. A ribozyme having specificity for a nucleic acid molecule encoding a polypeptide selected from the group consisting of Seq ID No. 13 to 24 a polypeptide selected from the group consisting of Seq ID No 86 to 146 can be designed based upon the nucleotide sequence of a cDNA disclosed herein. For example, a derivative of a Tetrahymena L-19 JVS RNA can be constructed in which the nucleotide sequence of the active site is complementary to the nudeotide sequence to be cleaved. Cech et al. U.S. Pat. No.4,987,071; and Cech et al. U.S. Pat. No. 5,116,742. Alternatively, an mRNA encoding any one of the genes listed in tables 1 and 2 can be used to select a catalytic RNA having a specific ribonuclease activity from a pool of RNA molecules. See, e.g., Bartel and Szostak (1993) Science 261.1411-1418.

[0090] The invention also encompasses nucleic acid molecules which form triple helical structures. For example, expression of a polypeptide selected from the group consisting of Seq ID No. 19 to 24 or a polypeptide selected from the group consisting of Seq ID No 99 to 146, can be inhibited by targeting nucleotide sequences complementary to the regulatory region of the gene encoding the polypeptide (e.g., the promoter and/or enhancer) to form triple helical structures that prevent transcription of the gene in target cells. See generally Helene (1991) Anticancer Drug Des. 6(6):569-84; Helene (1992) Ann. N.Y Acad. Sci. 660:27-36; and Maher (1992) Bioassays 14(12):807-15.

[0091] In certain embodiments, the nucleic acid molecules of the invention can be modified at the base moiety, sugar moiety or phosphate backbone to improve, e.g., the stability, hybridization, or solubility of the molecule. For example, the deoxyribose phosphate backbone of the nucleic acids can be modified to generate peptide nucleic acids (see Hyrup et al. (1996) Bioorganic & Medicinal Chemistry 4(1): 5-23). As used herein, the terms “peptide nucleic acids” or “PNAs” refer to nucleic acid mimics, e.g., DNA mimics, in which the deoxyribose phosphate backbone is replaced by a pseudopeptide backbone and only the four natural nucleobases are retained. The neutral backbone of PNAs has been shown to allow for specific hybridization to DNA and RNA under conditions of low ionic strength. The synthesis of PNA oligomers can be performed using standard solid phase peptide synthesis protocols as described in Hyrup et al. (1996), supra; Perry-O'Keefe et al. (1996) Proc. Natl. Acad. Sci. USA 93: 14670-675. PNAs can be used in therapeutic and diagnostic applications. For example, PNAs can be used as antisense or antigene agents for sequence-specific modulation of gene expression by, e.g., inducing transcription or translation arrest or inhibiting replication. PNAs can also be used, e.g., in the analysis of single base pair mutations in a gene by, e.g., PNA directed PCR clamping; as artificial restriction enzymes when used in combination with other enzymes, e.g., 51 nucleases (Hyrup (1996), supra; or as probes or primers for DNA sequence and hybridization (Hyrup (1996), supra; Perry-O'Keefe et al. (1996) Proc. Natl. Acad. Sci. USA 93:1467˜675).

[0092] In another embodiment, PNAs can be modified, e.g., to enhance their stability or cellular uptake, by attaching lipophilic or other helper groups to PNA, by the formation of PNA-DNA chimeras, or by the use of liposomes or other techniques of drug delivery known in the art. For example, PNA-DNA chimeras can be generated which may combine the advantageous properties of PNA and DNA. Such chimeras allow DNA recognition enzymes, e.g., RNAse H and DNA polymerases, to interact with the DNA portion while the PNA portion would provide high binding affinity and specificity. PNA-DNA chimeras can be linked using linkers of appropriate lengths selected in terms of base stacking, number of bonds between the nucleobases, and orientation (Hyrup (1996), supra). The synthesis of PNA-DNA chimeras can be performed as described in Hyrup (1996), supra, and Finn et al. (1996) Nucleic Acids Res. 24(17):3357-63. For example, a DNA chain can be synthesized on a solid support using standard phosphoramidite coupling chemistry and modified nucleoside analogs. Compounds such as 5′-(4-methoxytrityl)amino-5′-deoxy-thymidine phosphoramidite can be used as a link between the PNA and the 5′ end of DNA (Mag et al. (1989) Nucleic Acids Res. 17:5973-88). PNA monomers are then coupled in a stepwise manner to produce a chimeric molecule with a 5′ PNA segment and a 3′ DNA segment (Finn et al. (1996) Nucleic Acids Res. 24(17):3357-63). Alternatively, chimeric molecules can be synthesized with a 5′ DNA segment and a 3′ PNA segment (Petersen et al. (1975) Bioorganic Med. Chem. Lett. 5:1119-11124).

[0093] In other embodiments, the oligonucleotide may include other appended groups such as peptides (e.g., for targeting host cell receptors in vivo), or agents facilitating transport across the cell membrane (see, e.g., Letsinger et al. (1989) Proc. Natl. Acad. Sci. USA 86:6553-6556; Lemaitre et al. (1987) Proc. Natl. Acad. Sci. USA 84:648-652; PCT Publication No. WO 88/09810) or the blood-brain barrier (see, e.g., PCT Publication No. WO 89110134). In addition, oligonucleotides can be modified with hybridization-triggered cleavage agents (see, e.g., Krol et al. (1988) Bio/Techniques 6:958-976) or intercalating agents (see, e.g., Zon (1988) Pharm. Res. 5:539-549). To this end, the oligonucleotide may be conjugated to another molecule, e.g., a peptide, hybridization triggered cross-linking agent, transport agent, hybridization-triggered cleavage agent, etc.

[0094] The present invention provides a use of a gene or a polypeptide encoded by a gene listed in tables 2 and/or 3 or Seq ID No. 25 to 85 as a target for screening of compounds that reduce and/or prevent obesity.

[0095] The present invention also provides a use of a nucleic acid encoding a polypeptide selected from the group consisting of Seq ID No. 13-24 a polypeptide selected from the group consisting of Seq ID No 86 to 146, or of mutants or fragments thereof as a target for screening of compounds that reduce and/or prevent obesity.

III. Isolated Proteins and Antibodies

[0096] One aspect of the invention pertains to isolated proteins, and biologically active portions thereof, as well as polypeptide fragments suitable for use as immunogen to raise antibodies directed against a polypeptide selected from the group consisting of Seq ID No. 13 to 24 or a polypeptide selected from the group consisting of Seq ID No 86 to 146. In one embodiment, native polypeptide can be isolated from cells or tissue sources by an appropriate purification scheme using standard protein purification techniques. In another embodiment, polypeptides of the invention are produced by recombinant DNA techniques. Alternative to recombinant expression, polypeptides can be synthesized chemically using standard peptide synthesis techniques. This section describes polypeptides of any one of Seq ID No. 13 to 24 or SeqID No. 86 to 146, antibodies directed against said polypeptides, and methods for making and using such polypeptides and antibodies.

[0097] An “isolated” or “purified” protein or biologically active portion thereof is substantially free of cellular material or other contaminating proteins from the cell or tissue source from which the protein is derived, or substantially free of chemical precursors or other chemicals when chemically synthesized. The language “substantially free of cellular material” includes preparations of protein in which the protein is separated from cellular components of the cells from which it is isolated or recombinantly produced. Thus, protein that is substantially free of cellular material includes preparations of protein having less than about 30%, 20%, 10%, or 5% (by dry weight) of heterologous protein (also referred to herein as a “contaminating protein”). When the protein or biologically active portion thereof is recombinantly produced, it is also preferably substantially free of culture medium, i.e., culture medium represents less than about 20%, 10%, or 5% of the volume of the protein preparation. When the protein is produced by chemical synthesis, it is preferably substantially free of chemical precursors or other chemicals, i.e., it is separated from chemical precursors or other chemicals which are involved in the synthesis of the protein. Accordingly such preparations of the protein have less than about 30%, 20%, 10%, 5% (by dry weight) of chemical precursors or unrelated chemicals.

[0098] Biologically active portions of a polypeptide selected from the group consisting of Seq ID No. 13 to 24 or a polypeptide selected from the group consisting of Seq ID No 86 to 146 include polypeptides comprising amino acid sequences sufficiently identical to or derived from the amino acid sequence of the protein which include fewer amino acids than the full length protein, and exhibit at least one activity of the corresponding full-length protein. Typically, biologically active portions comprise a domain or motif with at least one activity of the corresponding portion. A biologically active portion of the invention can be a polypeptide which is, for example, 10, 25, 50, 100 or more amino acids in length. Moreover, other biologically active portions, in which other regions of the protein are deleted, can be prepared by recombinant techniques and evaluated for one or more of the functional activities of the native form of said polypeptide.

[0099] Among the useful polypeptides are those having the amino acid sequence of a polypeptide selected from the group consisting of Seq ID No. 13 to 24 or a polypeptide selected from the group consisting of Seq ID No 86 to 146. Other useful proteins are substantially identical (e.g., at least about 96%, 97%, 98%, 99%, or 99.5%) to any of said polypeptides and retain the functional activity of the protein of the corresponding naturally-occurring protein yet differ in amino acid sequence due to natural allelic variation or mutagenesis. To determine the percent identity of two amino acid sequences or of two nucleic acid sequences, the sequences are aligned for optimal comparison purposes (e.g., gaps can be introduced in the sequence of a first amino acid or nucleic acid sequence for optimal alignment with a second amino or nucleic acid sequence). The amino acid residues or nucleotides at corresponding amino acid positions or nucleotide positions are then compared. When a position in the first sequence is occupied by the same amino acid residue or nucleotide as the corresponding position in the second sequence, then the molecules are identical at that position. The percent identity between the two sequences is a function of the number of identical positions shared by the sequences (i.e., % identity=# of identical positions/total # of positions (e.g., overlapping positions)xlOo). Preferably, the two sequences are the same length.

[0100] The invention also provides chimeric or fusion proteins. As used herein, a “chimeric protein” or “fusion protein” comprises all or part (e.g., biologically active fragment) of a polypeptide selected from the group consisting of one Seq ID No. 13 to 24 or a polypeptide selected from the group consisting of Seq ID No 86 to 146 operably linked to a heterologous polypeptide (i.e., a polypeptide other than the same polypeptide of the invention). Within the fusion protein, the term “operably linked” is intended to indicate that the polypeptide of the invention and the heterologous polypeptide are fused in-frame to each other. The heterologous polypeptide can be fused to the N-terminus or C-terminus of said polypeptide.

[0101] One useful fusion protein is a GST fusion protein in which all or a portion of a polypeptide selected from the group consisting of Seq ID No.13 to 24 or a polypeptide selected from the group consisting of Seq ID No 86 to 146 is fused to the C-terminus of GST sequences. Such fusion proteins can facilitate the purification of a recombinant polypeptide. Other useful fusion proteins include fusions to FLAGTM, a portion lacZ, GST, calmodulin-binding peptide, His⁶, or HA. Vectors for preparing such fusions proteins are available from Clontech, Inc. (Palo Alto, Calif.) and Stratagene, Inc. (La Jolla, Calif.).

[0102] In another embodiment, the fusion protein contains a heterologous signal sequence at its N-terminus. For example, the native signal sequence of any one of the polypeptides of Seq ID No. 13 to 24 or Seq ID No.86 o 146 can be removed and replaced with a signal sequence from another protein. For example, the gp67 secretory sequence of the baculovirus envelope protein can be used as a heterologous signal sequence (Current Protocols in Molecular Biology, Ausubel et al., eds., John Wiley & Sons, 1992). Other examples of eukaryotic heterologous signal sequences include the secretory sequences of melittin and human placental alkaline phosphatase (Stratagene; La Jolla, Calif.). In yet another example, useful prokaryotic heterologous signal sequences include the phoA secretory signal (Sambrook Ct al., supra) and the protein A secretory signal (Pharmacia Biotech; Piscataway, N.J.).

[0103] In yet another embodiment, the fusion protein is an immunoglobulin fusion protein in which all or part of the sequence of a polypeptide of Seq ID No. 13 to 24 or Seq ID No.86 to 146 is fused to sequences derived from a member of the immunoglobulin protein family. The immunoglobulin fusion proteins of the invention can be incorporated into pharmaceutical compositions and administered to a subject to inhibit an interaction between a ligand (soluble or membrane-bound) and a protein on the surface of a cell (receptor), to thereby suppress signal transduction in vivo. The immunoglobulin fusion protein can be used to affect the bioavailability of a cognate ligand of a polypeptide of Seq ID No. 13 to 24 or Seq ID No. 86 to 146. Inhibition of ligand/receptor interaction may be useful therapeutically for modulating feeding behavior, body weight, and/or metabolic rate. Moreover, the immunoglobulin fusion proteins of the invention can be used as immunogen to produce antibodies directed against a polypeptide hereinbefore described in a subject, to purify ligands and in screening assays to identify molecules which inhibit the interaction of receptors with ligands.

[0104] Chimeric and fusion protein of the invention can be produced by standard recombinant DNA techniques. In another embodiment, the fusion gene can be synthesized by conventional techniques including automated DNA synthesizers. Alternatively, PCR amplification of gene fragments can be carried out using anchor primers which give rise to complementary overhangs between two consecutive gene fragments which can subsequently be annealed and reamplified to generate a chimeric gene sequence (see, e.g., Ausubel et al., supra). Moreover, many expression vectors are commercially available that already encode a fusion moiety (e.g., a GSJ polypeptide). A nucleic acid encoding any one of the polypeptides of Seq ID No. 13 to 24 or Seq ID No. 86 to 146 can be cloned into such an expression vector such that the fusion moiety is linked in-frame to the polypeptide of the invention.

[0105] The present invention also pertains to variants of any one of the polypeptides of Seq ID No. 13 to 24 or Seq ID No. 86 to 146. Such variants have an altered amino acid sequence which can function as either agonists (mimetics) or as antagonist. Variants can be generated by mutagenesis, e.g., discrete point mutation or truncation. An agonist can retain substantially the same, or a subset, of the biological activities of the naturally occurring form of the protein. An antagonist of a protein can inhibit one or more of the activities of the naturally occurring form of the protein by, for example, competitively binding to a downstream or upstream member of a cellular signaling cascade which includes the protein of interest. Thus, specific biological effects can be elicited by treatment with a variant of limited function. Treatment of a subject with a variant having a subset of the biological activities of the naturally occurring form of the protein can have fewer side effects in a subject relative to treatment with the naturally occurring form of the protein.

[0106] Variants of a protein of the invention which function as either agonists (mimetics) or as antagonists can be identified by screening combinatorial libraries of mutants, e.g., truncation mutants, of the protein of the invention for agonist or antagonist activity. In one embodiment, a variegated library of variants is generated by combinatorial mutagenesis at the nucleic acid level and is encoded by a variegated gene library. A variegated library of variants can be produced by, for example, enzymatically ligating a mixture of synthetic oligonucleotides into gene sequences such that a degenerate set of potential protein sequences is expressible as individual polypeptides, or alternatively, as a set of larger fusion proteins (e.g., for phage display). There are a variety of methods which can be used to produce libraries of potential variants of the polyepeptides of the invention from a degenerate oligonucleotide sequence. Methods for synthesizing degenerate oligonucleotides are known in the art (see, e.g., Narang (1983) Tetrahedron 39:3; Itakura et al. (1984)Arniu. Rev. Biochem. 53:323; Itakura et al. (1984) Science 198:1056; Ike et al. (1983) Nucleic Acid Res. 11:477).

[0107] In addition, libraries of fragments of a polypeptide selected from the group consisting of Seq ID No. 13 to 24or a polypeptide selected from the group consisting of Seq ID No 86 to 146 can be used to generate a variegated population of polypeptides for screening and subsequent selection of variants. For example, a library of coding sequence fragments can be generated by treating a double stranded PCR fragment of the coding sequence of interest with a nuclease under conditions wherein nicking occurs only about once per molecule, denaturing the double stranded DNA, renaturing the DNA to form double stranded DNA which can include sense/antisense pairs from different nicked products, removing single stranded portions from reformed duplexes by treatment with SI nuclease, and ligating the resulting fragment library into an expression vector. By this method, an expression library can be derived which encodes N-terminal and internal fragments of various sizes of the protein of interest.

[0108] Several techniques are known in the art for screening gene products of combinatorial libraries made by point mutations or truncation, and for screening cDNA libraries for gene products having a selected property. The most widely used techniques, which are amenable to high through-put analysis, for screening large gene libraries typically include cloning the gene library into replicable expression vectors, transforming appropriate cells with the resulting library of vectors, and expressing the combinatorial genes under conditions in which detection of a desired activity facilitates isolation of the vector encoding the gene whose product was detected.

[0109] Recursive ensemble mutagenesis (REM), a technique which enhances the frequency of functional mutants in the libraries, can be used in combination with the screening assays to identify variants of a protein of the invention (Arkin and YollrvaIl (1992) Proc. Natl Acad USA 89:7811-7815; Delgrave et al. (1993) Protein Engineering 6(3):327-331).

IV. Recombinant Expression Vectors and Host Cells

[0110] Another aspect of the invention pertains to vectors (e.g., expression vectors) containing a nucleic acid encoding a polypeptide selected from the group consisting of Seq ID No. 13 to 24 or a polypeptide selected from the group consisting of Seq ID No 86 to 146 (or a portion thereof). As used herein, the “vector” refers to a nucleic acid molecule capable of transporting another nucleic acid to which it has been linked. One type of vector is a “plasmid,” which refers to a circular double stranded DNA loop into which additional DNA segments can be ligated. Another type of vector is a viral vector, wherein additional DNA segments can be ligated into the viral genome. Certain vectors are capable of autonomous replication in a host cell into which they are introduced (e.g., bacterial vectors having a bacterial origin of replication and episomal mammalian vectors). Other vectors (e.g., non-episomal mammalian vectors) are integrated into the genome of a host cell upon introduction into the host cell, and thereby are replicated along with the host genome. Moreover, certain vectors, expression vectors, are capable of directing the expression of genes to which they are operably linked. In general, expression vectors of utility in recombinant DNA techniques are often in the form of plasmids (vectors). However, the invention is intended to include such other forms of expression vectors, such as viral vectors (e.g., replication defective retroviruses, adenoviruses and adeno-associated viruses), which serve equivalent functions. This section describes vectors and host cells harboring nucleic acids selected from the group consisting of Seq ID No. 1 to 12 a gene selected from the group consisting of Seq ID No 25 to 85 and variants thereof and methods for their production and use.

[0111] The recombinant expression vectors of the invention comprise a nucleic acid of the invention in a form suitable for expression of the nucleic acid in a host cell. This means that the recombinant expression vectors include one or more regulatory sequences, selected on the basis of the host cells to be used for expression, which is operably linked to the nucleic acid sequence to be expressed. Within a recombinant expression vector, “operably linked” is intended to mean that the nucleotide sequence of interest is linked to the regulatory sequence(s) in a manner which allows for expression of the nucleotide sequence (e.g., in an in vitro transcription/translation system or in a host cell when the vector is introduced into the host cell). The term “regulatory sequence” is intended to include promoters, enhancers and other expression control elements (e.g., polyadenylation signals). Such regulatory sequences are described, for example, in Goeddel, Gene Expression Technology: Methods in Enzymology 185, Academic Press, San Diego, Calif. (1990). Regulatory sequences include those which direct constitutive expression of a nucleotide sequence in many types of host cell and those which direct expression of the nucleotide sequence only in certain host cells (e.g., tissue-specific regulatory sequences). It will be appreciated by those skilled in the art that the design of the expression vector can depend on such factors as the choice of the host cell to be transformed, the level of expression of protein desired, etc. The expression vectors of the invention can be introduced into host cells to thereby produce proteins or peptides, including fusion proteins or peptides, encoded by nucleic acids as described herein.

[0112] The recombinant expression vectors of the present invention can be designed for expression of a gene listed in tables 2 or 3 or Seq ID No. 25 to 85 in prokaryotic or eukaryotic cells, e.g., bacterial cells such as E. coli, insect cells (using baculovirus expression vectors), yeast cells or mammalian cells. Suitable host cells are discussed further in Goeddel, supra. Alternatively, the recombinant expression vector can be transcribed and translated in vitro, for example using T7 promoter regulatory sequences and T7 polymerase.

[0113] Expression of proteins in prokaryotes is most often carried out in E. coli with vectors containing constitutive or inducible promoters directing the expression of either fusion or non-fusion proteins. Fusion vectors add a number of amino acids to a protein encoded therein, usually to the amino terminus of the recombinant protein. Such fusion vectors typically serve three purposes: 1) to increase expression of recombinant protein; 2) to increase the solubility of the recombinant protein; and 3) to aid in the purification of the recombinant protein by acting as a ligand in affinity purification. Often, in fusion expression vectors, a proteolytic cleavage site is introduced at the junction of the fusion moiety and the recombinant protein to enable separation of the recombinant protein from the fusion moiety subsequent to purification of the fusion protein. Such enzymes, and their cognate recognition sequences, include Factor Xa, thrombin and enterokinase. Typical fusion expression vectors include PGEX (Pharmacia Biotech Inc; Smith and Johnson (1988) Gene 67:31-40), pMAL (New England Biolabs, Beverly, Mass.) and pRIT5 (Pharmacia Piscataway, N.J.) which fuse glutathione 5-transferase (GST), maltose E binding protein, or protein A, respectively, to the target recombinant protein.

[0114] Examples of suitable inducible non-fusion E. coli expression vectors include pTrc (Amann et al., (1988) Gene 69:301-315) and pET lid (Studier et al., Gene Expression Technology: Methods in Enzymology 185, Academic Press San Diego, Calif. (1990) 60˜9). Target gene expression from the pTrc vector relies on host RNA polymerase transcription from a hybrid trp-lac fusion promoter. Target gene expression from the pET lid vector relies on transcription from a T7 gn10-lac fusion promoter mediated by a coexpressed viral RNA polymerase (T7 gnl). The viral polymerase is supplied by host strains BL21(DE3) or HM5174 (DE3) from a resident prophage harboring a T7 gn1 gene under the transcriptional control of the lacUV 5 promoter.

[0115] One strategy to maximize recombinant protein expression in E. coli is to express the protein in a host bacteria with an impaired capacity to proteolytically cleave the recombinant protein (Gottesman, Gene Expression Technology: Methods in Enzymology 185, Academic Press, San Diego, Calif. (1990) 119-128). Another strategy is to alter the nucleic acid sequence of the nucleic acid to be inserted into an expression vector so that the individual codons for each amino acid are those preferentially utilized in E. coli (Wada et al. (1992) Nucleic Acids Res. 20:2111-2118). Such alteration of nucleic acid sequences of the invention can be carried out by standard DNA synthesis techniques.

[0116] In another embodiment, the expression vector is a yeast expression vector. Examples of vectors for expression in yeast S. cerivisae include pYepSecl (Baldari et al. (1987) mEMBO J. 6:229-234), pMFa (Kurjan and Herskowitz, (1982) Cell 30:933˜943), pJRY88 (Schultz et al. (1987) Gene 54:113-123), pYES2 (Invitrogen Corporation, SanDiego, Calif.), and pPicZ (In Vitrogen Corp, San Diego, 15 Calif.).

[0117] Alternatively, the expression vector is a baculovirus expression vector. Baculovirus vectors available for expression of proteins in cultured insect cells (e.g., Sf 9 cells) include the pAc series (Smith et al. (1983) Mol. Cell Biol.20 3:2156-2165) and the pVL series (Lucklow and Summers (1989) virology 170:31-39).

[0118] In yet another embodiment, a nucleic acid of the invention is expressed in mammalian cells using a mammalian expression vector. Examples of mammalian expression vectors include pCDM8 (Seed (1987) Nature 329:840) and pMT2PC (Kaufman et al. (1987) EMBO J. 6:187-195). When used in mammalian cells, the expression vector's control functions are often provided by viral regulatory elements. For example, commonly used promoters are derived from polyoma, Adenovirus 2, cytomegalovirus and Simian Virus 40. For other suitable expression systems for both prokaryotic and eukaryotic cells see chapters 16 and 17 of Sambrook et al., supra.

[0119] In another embodiment, the recombinant mammalian expression vector is capable of directing expression of the nucleic acid preferentially in a particular cell type (e.g., tissue-specific regulatory elemen[s are ilsed to express the nucleic acid). Tissue-specific regulatory elements are known in the art. Non-limiting examples of suitable tissue-specific promoters include the albumin promoter (liver-specific; Pinkert et al. (1987) Genes Dev. 1:268-277), lymphoid-specific promoters (Calame and Eaton (1988) Adv Immunol. 43:235-275), in particular promoters of T cell receptors (Winoto and Baltimore (1989) EMBO J. 8:729-733) and immunoglobulins (Banerji et al. (1983) Cell 33:729-740; Queen and Baltimore (1983) Cell 33:741-748), neuron-specific promoters (e.g., the neurofilament promoter; Byrne and Ruddle (1989) Proc. Natl. Acad. Sci. USA 86:5473-5477), pancreas-specific promoters (Edlund et al. (1985) Science 230:912-916), and mammary gland-specific promoters (e.g., milk whey promoter; U.S. Pat. No.4,873, 316 and European Application Publication No.264,166). Developmentally-regulated promoters are also encompassed, for example the murine hox promoters (Kessel and Gruss (1990) Science 249:374-379) and the CL-fetoprotein promoter (Campes and Tilghman (1989) Genes Dev. 3:537-546).

[0120] The invention further provides a recombinant expression vector comprising a DNA molecule of the invention cloned into the expression vector in an antisense orientation. That is, the DNA molecule is operably linked to a regulatory sequence in a manner which allows for expression (by transcription of the DNA molecule) of an RNA molecule which is antisense to the mRNA encoding a polypeptide selected from the group consisting of Seq ID No. 13 to 24 or a polypeptide selected from the group consisting of Seq ID No 86 to 146. Regulatory sequences operably linked to a nucleic acid cloned in the antisense orientation can be chosen which direct the continuous expression of the antisense RNA molecule in a variety of cell types, for instance viral promoters and/or enhancers, or regulatory sequences can be chosen which direct constitutive, tissue specific or cell type specific expression of antisense RNA. The antisense expression vector can be in the form of a recombinant plasmid, phagemid or attenuated virus in which antisense nucleic acids are produced under the control of a high efficiency regulatory region, the activitvity of which can be determined by the cell type into which the vector is introduced. For a discussion of the regulation of gene expression using anti-sense genes see Weintraub et al. (Reviews—Trends in Genetics, Vol.1(1) 1986).

[0121] Another aspect of the invention pertains to host cells into which a recombinant expression vector of the invention has been introduced. It is understood that this termsrefer not only to the particular subject cell but also to the progeny or potential progeny of such a cell. Because certain modifications may occur in succeeding generations due to either mutation or environmental influences, such progeny may not, in fact, be identical to the parent cell, but are still included within the scope of the term as used herein.

[0122] A host cell can be any prokaryotic or eukaryotic cell (e.g., E. coli, insect cells, yeast or mammalian cells). Vector DNA can be introduced into prokaryotic or eukaryotic cells via conventional transformation or transfection techniques. As used herein, the terms “transformation” and “transfection” are intended to refer to a variety of art-recognized techniques for introducing foreign nucleic acid into a host cell, including calcium phosphate or calcium chloride co-precipitation, DEAE-dextran-mediated transfection, lipofection, or electroporation. Suitable methods for transforming or transfecting host cells can be found in Sambrook, et al. (supra), and other laboratory manuals.

[0123] For stable transfection of mammalian cells, it is known that, depending upon the expression vector and transfection technique used, only a small fraction of cells may integrate the foreign DNA into their genome. In order to identify and select these integrants, a gene that encodes a selectable marker (e.g., for resistance to antibiotics) is generally introduced into the host cells along with the gene of interest. Useful selectable markers include those which confer resistance to drugs, such as G418, hygromycin and methotrexate. Cells stably transfected with the introduced nucleic acid can be identified by drug selection (e.g., cells that have incorporated the selectable marker gene will survive, while the other cells die).

[0124] A host cell of the invention, such as a prokaryotic or eukaryotic host cell in culture, can be used to produce a polypeptide selected from the group consisting of Seq ID No. 13 to 24 or a polypeptide selected from the group consisting of Seq ID No 86 to 146. Accordingly, the invention further provides methods for producing a polypeptide selected from the group consisting of Seq ID No. 13 to 24 or a polypeptide selected from the group consisting of Seq ID No 86 to 146 using the host cells of the invention. In one embodiment, the method comprises culturing the host cell of invention (into which a recombinant expression vector encoding a polypeptide selected from the group consisting of Seq ID No. 13 to 24 or a polypeptide selected from the group consisting of Seq ID No 86 to 146 has been introduced) in a suitable medium such that the polypeptide is produced. In another embodiment, the method further comprises isolating the polypeptide from the medium or the host cell.

V. Methods of Treatment

[0125] The present invention provides for both prophylactic and therapeutic methods for modulating body weight, e.g., by altering feeding behavior or metabolic rate.

[0126] In one aspect, the present invention provides a method for modulating body weight by administering an agent which modulates an activity of any one of the polypeptides of Seq ID No. 13 to 24 or Seq ID No. 86 to 146. Such methods are useful for modulating body weight both in patients having aberrant expression or activity of said polypeptide or other patients which would benefit from administration of an agent which modulates activity of said polypeptide. Depending on the needs of the patient a polypeptide agonist or antagonist can be used for treating the subject.

[0127] Agonists of the activity of any one of the polypeptides of Seq ID No. 13-18 or Seq ID No. 86 to 146, or compounds which increase expression of said polypeptide are useful for treatment of high body weight, e.g., obesity, because they can be used to reduce body weight. Similarly, compounds which increase the activity or expression of a protein in the [symbol] ignaling pathway of said polypeptide are useful for treatment of high body weight. Conversely, antagonists of the activity of said polypeptide or compounds which reduce the expression or activity of said polypeptide are useful for treatment of low body weight, e.g., cachexia, because they can be used to increase body weight. Compounds which reduce the activity or expression of a protein in the [symbol] ignaling pathway of a polypeptide of any one of Seq ID NO. 13 to 18 or Seq ID No. 86 to 146 are useful for treatment of low body weight.

[0128] Antagonists of the activity of any one of the polypeptides of Seq ID No. 19-24 or Seq ID No. 99 to 146, or compounds which decrease expression of said polypeptide are useful for treatment of high body weight, e.g., obesity, because they can be used to reduce body weight. Similarly, compounds which decrease the activity or expression of a protein in the [symbol] ignaling pathway of said polypeptide are useful for treatment of high body weight. Conversely, agonists of the activity of said polypeptide or compounds which increase the expression or activity of said polypeptide are useful for treatment of low body weight, e.g., cachexia, because they can be used to increase body weight. Compounds which icrease the activity or expression of a protein in the [symbol] ignaling pathway of a polypeptide of any one of Seq ID NO. 19 to 24 or Seq ID No. 99 to 146 are useful for treatment of low body weight.

[0129] The present invention also provides a use of an agonist, or a compound which increases the expression of a polypeptide selected from the group consisting of Seq ID No. 13 tol8 or a polypeptide selected from the group consisting of Seq ID No 86 to 98 for the preparation of a medicament for the treatment of obesity. Futhermore, the present invention provides a use of an antagonist, or a compound that decreases the expression of a polypeptide selected from the group consisting of Seq ID No. 19 to 24 or a polypeptide selected from the group consisting of Seq ID No 99 to 146 for the preparation of a medicament for the treatment of obesity.

VI. Pharmaceutical Compositions

[0130] The present invention further pertains to novel agents identified by the above-described screening assays and uses thereof for treatments as described herein. The nucleic acid molecules, polypeptides, and antibodies (also referred to herein as “active compounds”) of the invention can be incorporated into pharmaceutical compositions suitable for administration. Such compositions typically comprise the nucleic acid molecule, protein, or anti-body and a pharmaceutically acceptable carrier. As used herein the language “pharmaceutically acceptable carrier” is intended to include any and all solvents, dispersion media, coatings, antibacterial and antifungal agents, isotonic and absorption delaying agents, and the like, compatible with pharmaceutical administration. The use of such media and agents for pharmaceutically active substances is well known in the art. Except insofar as any conventional media or agent is incompatible with the active compound, use thereof in the compositions is contemplated. Supplementary active compounds can also be incorporated into the compositions.

[0131] The invention includes pharmaceutical compositions comprising a modulator of expression or activity of any one of the polypeptides of Seq ID No. 13 to 24 or Seq ID No. 86 to 146 (and/or a modulator of the activity or expression of a protein in the signalling pathway of said polypeptide) as a well as methods for preparing such compositions by combining one or more such modulators and a pharmaceutically acceptable carrier. Also within the scope of the present invention are pharmaceutical compositions comprising a modulator identified using the screening assays of the invention packaged with instructions for use. For modulators that are antagonists of the activity of any one of the polypeptides of Seq ID No. 13 to 24 or Seq ID No. 86 to 146 or which reduce the expression of said polypeptide, the instructions would specify use of the pharmaceutical composition for treatment of low body weight (e.g., increase of body weight). For modulators that are agonists of the activity of said polypeptide or increase the expression of said polypeptide, the instructions would specify use of the pharmaceutical composition for treatment of high body weight (i.e., reduction of body weight).

[0132] The present invention provides a pharmaceutical formulation for the modulation of body weight, comprising a compound that modulates the activity of a polypeptide selected from the group consisting of Seq ID No. 86 to 146, mixed with a pharmaceutically acceptable carrier.

[0133] A pharmaceutical composition of the invention is formulated to be compatible with its intended route of administration. Examples of routes of administration include parenteral, e.g., intravenous, intradermal, subcutaneous, oral (e. g., inhalation), transdermal (topical), transmucosal, and rectal administration. Solutions or suspensions used for parenteral, intradermal, or subcutaneous application can include the following components: a sterile diluent such as water for injection, saline solution, fixed oils, polyethylene glycols, glycerine, propylene glycol or other synthetic solvents; antibacterial agents such as benzyl alcohol or methyl parabens; antioxidants such as ascorbic acid or sodium bisulfite; chelating agents such as ethylenediaminetetraacetic acid; buffers such as acetates, citrates or phosphates and agents for the adjustment of tonicity such as sodium chloride or dextrose. pH can be adjusted with acids or bases, such as hydrochloric acid or sodium hydroxide. The parenteral preparation can be enclosed in ampoules, disposable syringes or multiple dose vials made of glass or plastic.

[0134] Pharmaceutical compositions suitable for injectable use include sterile aqueous solutions (where water soluble) or dispersions and sterile powders for the extemporaneous preparation of sterile injectable solutions or dispersions are provided. For intravenous administration, suitable carriers include physiological saline, bacteriostatic water, Cremophor ELTM (BASF; Parsippany, N.J.) or phosphate buffered saline (PBS). In all cases, the composition must be sterile and should be fluid to the extent that easy syringability exists. It must be stable under the conditions of manufacture and storage and must be preserved against the contaminating action of microorganisms such as bacteria and fungi. The carrier can be a solvent or dispersion medium containing, for example, water, ethanol, polyol (for example, glycerol, propylene glycol, and liquid polyetheylene glycol, and the like), and suitable mixtures thereof. The proper fluidity can be maintained, for example, by the use of a coating such as lecithin, by the maintenance of the required particle size in the case of dispersion and by the use of surfactants. Prevention of the action of microorganisms can be achieved by various antibacterial and antifungal agents, for example, parabens, chlorobutanol, phenol, ascorbic acid, thimerosal, and the like. In many cases, it will be preferable to include isotonic agents, for example, sugars, polyalcohols such as mannitol, sorbitol, sodium chloride in the composition. Prolonged absorption of the injectable compositions can be brought about by including in the composition an agent which delays absorption, for example, aluminum monostearate and gelatin.

[0135] Sterile injectable solutions can be prepared by incorporating the active compound (e.g., a polypeptide or antibody) in the required amount in an appropriate solvent with one or a combination of ingredients enumerated above, as required, followed by filtered sterilization. Generally, dispersions are prepared by incorporating the active compound into a sterile vehicle which contains a basic dispersion medium and the required other ingredients from those enumerated above. In the case of sterile powders for the preparation of sterile injectable solutions, the preferred methods of preparation are vacuum drying and freeze-drying which yields a powder of the active ingredient plus any additional desired ingredient from a previously sterile-filtered solution thereof.

[0136] Oral compositions generally include an inert diluent or an edible carrier. They can be enclosed in gelatin capsules or compressed into tablets. For the purpose of oral therapeutic administration, the active compound can be incorporated with excipients and used in the form of tablets, troches, or capsules. Oral compositions can also be prepared using a fluid carrier for use as a mouthwash, wherein the compound in the fluid carrier is applied orally and swished and expectorated or swallowed. Pharmaceutically compatible binding agents, and/or adjuvant materials can be included as part of the composition. The tablets, pills, capsules, troches and the like can contain any of the following ingredients, or compounds of a similar nature: a binder such as microcrystalline cellulose, gum tragacanth or gelatin; an excipient such as starch or lactose, a disintegrating agent such as alginic acid, Primogel, or corn starch; a lubricant such as magnesium stearate or Sterotes; a glidant such as colloidal silicon dioxide; a sweetening agent such as sucrose or saccharin; or a flavoring agent such as peppermint, methyl salicylate, or orange flavoring.

[0137] For administration by inhalation, the compounds are delivered in the form of an aerosol spray from a pressurized container or dispenser which contains a suitable propellant, e.g., a gas such as carbon dioxide, or a nebulizer.

[0138] Systemic administration can also be by transmucosal or transdermal means. For transmucosal or transdermal administration, penetrants appropriate to the barrier to be permeated are used in the formulation. Such penetrants are generally known in the art, and include, for example, for transmucosal administration, detergents, bile salts, and fusidic acid derivatives. Transmucosal administration can be accomplished through the use of nasal sprays or suppositories. For transdermal administration, the active compounds are formulated into ointments, salves, gels, or creams as generally known in the art.

[0139] The compounds can also be prepared in the form of suppositories (e.g., with conventional suppository bases such as cocoa butter and other glycerides) or retention enemas for rectal delivery.

[0140] In one embodiment, the active compounds are prepared with carriers that will protect the compound against rapid elimination from the body, such as a controlled release formulation, including implants and microencapsulated delivery systems. Biodegradable, biocompatible polymers can be used, such as ethylene vinyl acetate, polyanhydrides, polyglycolic acid, collagen, polyorthoesters, and polylactic acid. Methods for preparation of such formulations will be apparent to those skilled in the art. The materials can also be obtained commercially from Alza Corporation and Nova Pharmaceuticals, Inc. Liposomal suspensions (including liposomes targeted to infected cells with monoclonal antibodies to viral antigens) can also be used as pharmaceutically acceptable carriers. These can be prepared according to methods known to those skilled in the art, for example, as described in U.S. Pat. No.4,522,811.

[0141] It is especially advantageous to formulate oral or parenteral compositions in dosage unit form for ease of administration and uniformity of dosage. Dosage unit form as used herein refers to physically discrete units suited as unitary dosages for the subject to be treated; each unit containing a predetermined quantity of active compound calculated to produce the desired therapeutic effect in association with the required pharmaceutical carrier. The specification for the dosage unit forms of the invention are dictated by and directly dependent on the unique characteristics of the active compound and the particular therapeutic effect to t)e achieved, and the limitations inherent in the art of compounding such an active compound for the treatment of individuals.

[0142] The nucleic acid molecules of the invention can be inserted into vectors and used as gene therapy vectors. Gene therapy vectors can be delivered to a subject by, for example, intravenous injection, local administration (U.S. Pat. No. 5,328,470) or by stereotactic injection (see, e.g., Chen et al. (1994) Proc. Natl Acad. Sci. USA 91:3054-3057). The pharmaceutical preparation of the gene therapy vector can include the gene therapy vector in an acceptable diluent, or can comprise a slow release matrix in which the gene delivery vehicle is imbedded. Alternatively, where the complete gene delivery vector can be produced intact from recombinant cells, e.g. retroviral vectors, the pharmaceutical preparation can include one or more cells which produce the gene delivery system.

[0143] The pharmaceutical compositions can be included in a container, pack, or dispenser together with instructions for administration.

[0144] The present invention provides a pharmaceutical formulation for the modulation of body weight, comprising a compound that modulates the activity of a polypeptide selected from the group consisting of Seq ID No. 13 to 24 or a polypeptide selected from the group consisting of Seq ID No 86 to 146, mixed with a pharmaceutically acceptable carrier.

[0145] The present invention also refers to a package comprising the pharmaceutical formulation hereinbefore described and instructions for administering the pharmaceutical formulation for the purpose of modulating body weight.

[0146] The present invention pertains to a method for preparing a pharmaceutical composition useful for modulating body weight, the method comprising: a) contacting a test compound with a polypeptide selected from the group consisting of Seq ID No. 13 to 24 or a polypeptide selected from the group consisting of Seq ID No 86 to 146; b) determining whether the test compound binds to the polypeptide selected from the group consisting of Seq ID No. 13 to 24 or a polypeptide selected from the group consisting of Seq ID No 86 to 146; and c) combining the test compound that binds to the polypeptide selected from the group consisting of Seq ID No. 13 to 24 or a polypeptide selected from the group consisting of Seq ID No 86 to 146 with a pharmaceutically acceptable carrier to create a pharmaceutical composition useful for modulating body weight.

[0147] The present invention provides a method for preparing a pharmaceutical composition useful for modulating body weight, the method comprising: a) contacting a ligand of a polypeptide selected from the group consisting of Seq ID No.13 to 24 or a polypeptide selected from the group consisting of Seq ID No 86 to 146 with a polypeptide selected from the group consisting of Seq ID No.13 to 24 or a polypeptide selected from the group consisting of Seq ID No 86 to 146 in the presence and absence of a test compound; b) determining whether the test compound alters the binding of the ligand of the polypeptide selected from the group consisting of Seq ID No.13 to 24 or a polypeptide selected from the group consisting of Seq ID No 86 to 146 to the polypeptide selected from the group consisting of Seq ID No.13 to 24 or a polypeptide selected from the group consisting of Seq ID No 86 to 146; and c) combining the test compound that alters the binding of said ligand to said polypeptide with a pharmaceutically acceptable carrier to create a pharmaceutical composition useful for modulating body weight.

[0148] The present invention also provides a use of a gene selected from the group consisting of Seq ID No. 1 to 12 or a gene selected from the group consisting of Seq ID No 25 to 85, or of a polypeptide selected from the group consisting of Seq ID No 13 to 24 as a target for screening of compounds that reduce and/or prevent obesity.

[0149] The present invention further provides a use of a gene or a polypeptide encoded by a selected from the group consisting of Seq ID No.25 to 146 as a target for screening of compounds that reduce and/or prevent obesity.

[0150] Further to this, the present invention also pertains to a use of a nucleic acid encoding a polypeptide selected from the group consisting of Seq ID No.13-24, or of mutants or fragments thereof, as a target for screening of compounds that reduce and/or prevent obesity.

[0151] Furthermore, the present invention provides a use of a nucleic acid encoding a polypeptide selected from the group consisting of Seq ID No. 86 to 146, or of mutants or fragments thereof as a target for screening of compounds that reduce and/or prevent obesity.

[0152] The present invention also provides a kit for screening for compounds that reduce and/or prevent obesity comprising a polypeptide selected from the group consisting of Seq ID No. 13 to 24.

[0153] The present invention additionally provides a kit for screening for compounds that reduce and/or prevent obesity comprising a polypeptide selected from the group consisting of Seq ID No. 86 to 146.

### EXAMPLES

### Example 1

### RNA Preparation

[0154] Total RNA from 500 mg subcutaneous fat tissue was isolated using the TriZol reagent (Life Technologies) and the Fast RNA green (BIO101) kit according to the manufacturer's protocols. Total DNA was purified from contaminating DNA the RNeasy kit (Qiagen).

### Example 2

### Gene Expression Measurement by DNA Chips

[0155] Synthesis of first and second strand cDNA were performed using the SuperScript Choice Gene Chip Kit (Life Technologies) and reagents from Gibco. The double stranded cDNA, containing an incorporated T7 RNA polymerase binding site, was purified by extraction with a mix of phenol:chloroform:isoamylalcohol (Life Technologies). The organic and aqueous phases were separated by Phase Lock Gel (Eppendorf) and double-stranded cDNA was recovered by precipitation according to the manufacturer's protocol and then resuspended in water.

[0156] J The double-stranded cDNA was converted to biotin-labeled cRNA by in vitro transcription (IVT) using a T7 kit (Ambion) and biotin-containing ribonucleotides (Enzo—LOXO GmbH). The IVT-material was purified from unincorporated ribonucleotides using RNeasy spin columns (Qiagen). Following cleanup, the single-stranded biotin-labeled cRNA were chemically hydrolyzed to smaller fragments in 500 mM calcium acetate, 150 mM magnesium acetate, pH 8.1 for 35 min at 95° C. The reaction was terminated by chilling samples on ice.

[0157] Probes were hybridized to the U95 A GeneChip Microarray (Affymetrix) which contains features representing ˜12,000 genes. All washing, hybridization, detection, and signal amplification steps were performed using a GeneChip Fluidics Station (Affymetrix). Fluorescence intensity data was collected from the hybridized GeneArrays using a GeneArray scanner (Affymetrix). The raw files containing the fluorescence intensity information were transformed into data files using the Affymetrix Microarray Suite (MAS) software. Differentially expressed genes were identified using the Roche Affymetrix Chip Experiment Analysis (RACE-A) software. Differences between control patients (n=10) vs. obese case patients (n=10) were evaluated by several statistical filters as change factor vs. control.

TABLE 2
Genes down-regulated in fat tissue in obesity

| | | | | | | Unigene |
|---|---|---|---|---|---|---|
| Seq ID No. | | | | | | No. |
| DNA | | | | Lean | Obese | Accession |
| (protein) | Description | CHCF | P value | mean | mean | No. |
| 1 (13) | Alpha-2-glycoprotein, | −10.57 | 0.01292 | 122.29 | 10.35 | His.512643 |
| | zinc | | | | | NM001185 |
| 2 (14) | Insulin receptor substrate 1 | −1.25 | 0.00211 | 21.64 | 8.51 | Hs.390242 |
| | | | | | | NM005544 |
| 3 (15) | Apolipoprotein a-i | −418.62 | 0.05987 | 1678.49 | 621.08 | Hs.93194 |
| | | | | | | M27875 |
| 4 (16) | Aryl hydrocarbon | −1.14 | 0.00032 | 30.9 | 13.49 | Hs.131494 |
| | receptor nuclear | | | | | NM001668 |
| | translocator | | | | | |
| 5 (17) | Creatine kinase, brain | −0.82 | 0.01454 | 395.52 | 223.65 | Hs.173724 |
| | | | | | | NM001823 |
| 6 (18) | Sterol-c5-desaturase | −1.13 | 0.00011 | 48.56 | 27.03 | Hs.287749 |
| | | | | | | AF187981 |

[0158] TABLE 3
Genes up-regulated in fat tissue in obesity

| Seq ID | | | | | | Unigene |
|---|---|---|---|---|---|---|
| No. | | | | | | No. |
| DNA | | | | Lean | Obese | Accession |
| (protein) | Description | CHCF | P value | mean | mean | No. |
| 7 (19) | osteomodulin | 1.1 | 0.00008 | 2.96 | 7.77 | Hs.94070 |
| | | | | | | NM005014 |
| 8 (20) | Very low density | 1.65 | 0.0032 | 67.14 | 96.66 | Hs.370422 |
| | lipoprotein receptor | | | | | D16494 |
| 9 (21) | Hydroxysteroid (11-beta) | 1.87 | 0.00108 | 25.78 | 58.23 | Hs.275215 |
| | dehydrogenase 1 | | | | | NM005525 |
| 10 (22) | reelin | 1.72 | 0.00003 | 4.79 | 11.83 | Hs.431010 |
| | | | | | | U79716 |
| 11 (23) | Atp-binding cassette, sub- | 1.1 | 0.00193 | 17.71 | 38.51 | Hs.55879 |
| | family c (cftr/mrp), | | | | | AL133613 |
| | member 10 | | | | | |
| 12 (24) | Homo sapiens dna for | 2.63 | 0.00008 | 53.63 | 145.18 | D63861 |
| | cyclophilin 40 | | | | | |

[0159] TABLE 4
Genes down-regulated in fat tissue in obesity

| Seq | | | | Locus | |
|---|---|---|---|---|---|
| ID No. | | | | ID | |
| DNA | | | P | (Gene | Accession |
| (protein) | Description | CHCF | value | ID) | No. |
| 2 | Retinoid | — | 0.000 | 625 | NM_0069 |
| 5 (86) | x receptor | 0.63 | 41 | 8 | 17 |
| | gamma | | | | |
| 26 (87) | Vascular | −1.52 | 0.01468 | 7422 | NM_003376 |
| | endothelial | | | | |
| | growth factor | | | | |
| 27 (88) | Cannabinoid | −0.34 | 0.00788 | 1268 | NM_016083 |
| | receptor 1 | | | | Variant 1 |
| | (brain) | | | | |
| 28 (89) | | | | | NM_033181 |
| | | | | | Variant 2 |
| 29 (90) | Cathepsin O | −0.52 | 0.00260 | 1519 | NM_001334 |
| 30 (91) | Enoyl | −0.45 | 0.00169 | 1892 | NM_004092 |
| | coenzyme | | | | |
| | a hydratase, | | | | |
| | short | | | | |
| | chain 1, | | | | |
| | mitochondrial | | | | |
| 31 (92) | Vascular | −0.24 | 0.00169 | 7423 | NM_003377 |
| | endothelial | | | | |
| | growth factor B | | | | |
| 32 (93) | Pyruvate | −0.77 | 0.00520 | 5091 | NM_000920 |
| | carboxylase | | | | Variant A |
| 33 (94) | | | | | NM_022172 |
| | | | | | Variant 2 |
| 34 (95) | L-3-hydroxy- | −0.83 | 0.00201 | 3033 | NM_005327 |
| | acyl | | | | |
| | Coenzyme A | | | | |
| | dehydrogenase, | | | | |
| | short chain | | | | |
| 35 (96) | pyruvate | −0.47 | 0.00186 | 5164 | NM_002611 |
| | dehydrogenase | | | | |
| | kinase, | | | | |
| | isoenzyme 2 | | | | |
| 36 (97) | Citrate | −0.66 | 0.02528 | 1431 | NM_004077 |
| | synthase | | | | Variant 1 |
| 37 (98) | | | | | NM_198324 |
| | | | | | Variant 2 |

[0160] TABLE 5
Genes up-regulated in fat tissue in obesity

| Seq ID | | | | | |
|---|---|---|---|---|---|
| No. | | | | | |
| DNA | | | | Locus ID | |
| (protein) | Description | CHCF | P value | (Gene ID) | Accession No. |
| 38 (99) | fibroblast growth factor | 1.12 | 0.00015 | 2263 | NM_000141 |
| | receptor 2 | | | | Variant 1 |
| 39 (100) | | | | | NM_022969 |
| | | | | | Variant 2 |
| 40 (101) | | | | | NM_022970 |
| | | | | | Variant 3 |
| 41 (102) | | | | | NM_022971 |
| | | | | | Variant 4 |
| 42 (103) | | | | | NM_022972 |
| | | | | | Variant 5 |
| 43 (104) | | | | | NM_022973 |
| | | | | | Variant 6 |
| 44 (105) | | | | | NM_022974 |
| | | | | | Variant 7 |
| 45 (106) | | | | | NM_022975 |
| | | | | | Variant 8 |
| 46 (107) | | | | | NM_022976 |
| | | | | | Variant 9 |
| 47 (108) | | | | | NM_023028 |
| | | | | | Variant 10 |
| 48 (109) | | | | | NM_023029 |
| | | | | | Variant 11 |
| 49 (110) | | | | | NM_023030 |
| | | | | | Variant 12 |
| 50 (111) | | | | | NM_023031 |
| | | | | | Variant 13 |
| 51 (112) | tumor necrosis factor receptor | 0.32 | 0.00015 | 7133 | NM_001066 |
| | superfamily, member 1B | | | | |
| 52 (113) | tumor necrosis factor (ligand) | 0.75 | 0.00548 | 8743 | NM_003810 |
| | superfamily, member 10 | | | | |
| 53 (114) | angiopoietin 1 | 1.52 | 0.00010 | 284 | NM_001146 |
| | | | | | Variant 1 |
| 54 (115) | | | | | NM_139290 |
| | | | | | Variant 2 |
| 55 (116) | retinoid X receptor, alpha | 0.42 | 0.00885 | 6256 | NM_002957 |
| 56 (117) | degenerative spermatocyte | 1.19 | 0.00011 | 8560 | NM_003676 |
| | homolog, lipid desaturase | | | | Variant 1 |
| 57 (118) | | | | | NM_144780 |
| | | | | | Variant2 |
| 58 (119) | solute carrier family 7 member 7 | 1.15 | 0.00215 | 9056 | NM_003982 |
| 59 (120) | procollagen-lysine, 2- | | | | NM_000935 |
| | oxoglutarate 5-dioxygenase | | | | Variant 2 |
| 60 (121) | 2 | | | | NM_182943 |
| | | | | | Variant 1 |
| 61 (122) | UDP-glucose dehydrogenase | 0.64 | 0.00045 | 7358 | NM_003359 |
| 62 (123) | phosphatidylinositol-4- | 0.43 | 0.00892 | 8396 | NM_003559 |
| | phosphate 5-kinase, type II | | | | Variant 1 |
| 63 (124) | beta | | | | NM_138687 |
| | | | | | Variant 2 |
| 64 (125) | MAP kinase interacting | 0.64 | 0.00013 | 2872 | NM_017572 |
| | serine/threonine kinase 2 | | | | Sequence 1 |
| 65 (126) | | | | | NM_199054 |
| | | | | | Sequence 2 |
| 66 (127) | carboxypeptidase E | 1.52 | 0.00013 | 1363 | NM_001873 |
| 67 (128) | carboxypeptidase A3 (mast | 0.8 | 0.00802 | 1359 | NM_001870 |
| | cell) | | | | |
| 68 (129) | solute carrier family 38, | 1.45 | 0.00271 | 145389 | NM_153811 |
| | member 6 | | | | |
| 69 (130) | very low density lipoprotein | 1.65 | 0.00320 | 7436 | NM_003383 |
| | receptor | | | | |
| 70 (131) | cathepsin G | 1.61 | 0.00057 | 1511 | NM_001911 |
| 71 (132) | Galactokinase 2 | 1.02 | 0.00067 | 2585 | NM_001001556 |
| | | | | | Variant 2 |
| 72 (133) | | | | | NM_002044 |
| | | | | | Variant 1 |
| 73 (134) | prostaglandin D2 synthase | 1 | 0.00046 | 5730 | NM_000954 |
| 74 (135) | mitogen-activated protein | 0.86 | 0.00014 | 5601 | NM_002752 |
| | kinase 9 | | | | Variant 1 |
| 75 (136) | | | | | NM_139068 |
| | | | | | Variant 2 |
| 76 (137) | | | | | NM_139069 |
| | | | | | Variant 3 |
| 77 (138) | | | | | NM_139070 |
| | | | | | Variant 4 |
| 78 (139) | Interleukin 15 | 0.95 | 0.00007 | 3600 | NM_000585 |
| | | | | | Variant 3 |
| 79 (140) | | | | | NM_172174 |
| | | | | | Variant 1 |
| 80 (141) | | | | | NM_172175 |
| | | | | | Variant 2 |
| 81 (142) | mucosa associated lymphoid | 1.24 | 0.00380 | 10892 | NM_006785 |
| | tissue lymphoma translocation | | | | Variant 1 |
| 82 (143) | gene 1 | | | | NM_173844 |
| | | | | | Variant2 |
| 83 (144) | lysyl oxidase | 0.7 | 0.04940 | 4015 | NM_002317 |
| 84 (145) | Integrin beta 5 | 1.38 | 0.00030 | 3693 | NM_002213 |
| 85 (146) | aldehyde dehydrogenase 3 | 0.91 | 0.00003 | 224 | NM_000382 |
| | family, member A2 | | | | |

The application's sequence listing, which the Patent Office published only in electronic form, follows.

SEQUENCE LISTING (146 sequences)

SEQ ID NO: 1 - DNA, 897 bp, Homo sapiens
  alpha-2-glycoprotein 1, zinc (AZGP1) (1)..(897): accession No.s: NM 001185, Hs.512643, Locus ID: 563
atggtaagaatggtgcctgtcctgctgtctctgctgctgcttctgggtcctgctgtcccccaggagaaccaagatggtcgttactctctgacctatatctacactgggctgtccaagcatgttgaagacgtccccgcgtttcaggcccttggctcactcaatgacctccagttctttagatacaacagtaaagacaggaagtctcagcccatgggactctggagacaggtggaaggaatggaggattggaagcaggacagccaacttcagaaggccagggaggacatctttatggagaccctgaaagacattgtggagtattacaacgacagtaacgggtctcacgtattgcagggaaggtttggttgtgagatcgagaataacagaagcagcggagcattctggaaatattactatgatggaaaggactacattgaattcaacaaagaaatcccagcctgggtccccttcgacccagcagcccagataaccaagcagaagtgggaggcagaaccagtctacgtgcagcgggccaaggcttacctggaggaggagtgccctgcgactctgcggaaatacctgaaatacagcaaaaatatcctggaccggcaagatcctccctctgtggtggtcaccagccaccaggccccaggagaaaagaagaaactgaagtgcctggcctacgacttctacccagggaaaattgatgtgcactggactcgggccggcgaggtgcaggagcctgagttacggggagatgttcttcacaatggaaatggcacttaccagtcctgggtggtggtggcagtgcccccgcaggacacagccccctactcctgccacgtgcagcacagcagcctggcccagcccctcgtggtgccctgggaggccagctag

SEQ ID NO: 2 - DNA, 5828 bp, Homo sapiens
  insulin receptor substrate 1 (IRS1) (1)..(5828): accession No.s: NM005544, Hs.96063,  LocusID: 3667
cggcggcgcggtcggagggggccggcgcgcagagccagacgccgccgcttgttttggttggggctctcggcaactctccgaggaggaggaggaggagggaggaggggagaagtaactgcagcggcagcgccctcccgaggaacaggcgtcttccccgaacccttcccaaacctcccccatcccctctcgcccttgtcccctcccctcctccccagccgcctggagcgaggggcagggatgagtctgtccctccggccggtccccagctgcagtggctgcccggtatcgtttcgcatggaaaagccactttctccacccgccgagatgggcccggatggggctgcagaggacgcgcccgcgggcggcggcagcagcagcagcagcagcagcagcaacagcaacagccgcagcgccgcggtctctgcgactgagctggtatttgggcggctggtggcggctgggacggttggggggtgggaggaggcgaaggaggagggagaaccccgtgcaacgttgggacttggcaacccgcctccccctgcccaaggatatttaatttgcctcgggaatcgctgcttccagaggggaactcaggagggaaggcgcgcgcgcgcgcgcgctcctggaggggcaccgcagggacccccgactgtcgcctccctgtgccggactccagccggggcgacgagagatgcatcttcgctccttcctggtggcggcggcggctgagaggagacttggctctcggaggatcggggctgccctcaccccggacgcactgcctccccgccggcgtgaagcgcccgaaaactccggtcgggctctctcctgggctcagcagctgcgtcctccttcagctgcccctccccggcgcggggggcggcgtggatttcagagtcggggtttctgctgcctccagccctgtttgcatgtgccgggccgcggcgaggagcctccgccccccacccggttgtttttcggagcctccctctgctcagcgttggtggtggcggtggcagcatggcgagccctccggagagcgatggcttctcggacgtgcgcaaggtgggctacctgcgcaaacccaagagcatgcacaaacgcttcttcgtactgcgcgcggccagcgaggctgggggcccggcgcgcctcgagtactacgagaacgagaagaagtggcggcacaagtcgagcgcccccaaacgctcgatcccccttgagagctgcttcaacatcaacaagcgggctgactccaagaacaagcacctggtggctctctacacccgggacgagcactttgccatcgcggcggacagcgaggccgagcaagacagctggtaccaggctctcctacagctgcacaaccgtgctaagggccaccacgacggagctgcggccctcggggcgggaggtggtgggggcagctgcagcggcagctccggccttggtgaggctggggaggacttgagctacggtgacgtgcccccaggacccgcattcaaagaggtctggcaagtgatcctgaagcccaagggcctgggtcagacaaagaacctgattggtatctaccgcctttgcctgaccagcaagaccatcagcttcgtgaagctgaactcggaggcagcggccgtggtgctgcagctgatgaacatcaggcgctgtggccactcggaaaacttcttcttcatcgaggtgggccgttctgccgtgacggggcccggggagttctggatgcaggtggatgactctgtggtggcccagaacatgcacgagaccatcctggaggccatgcgggccatgagtgatgagttccgccctcgcagcaagagccagtcctcgtccaactgctctaaccccatcagcgtccccctgcgccggcaccatctcaacaatcccccgcccagccaggtggggctgacccgccgatcacgcactgagagcatcaccgccacctccccggccagcatggtgggcgggaagccaggctccttccgtgtccgcgcctccagtgacggcgaaggcaccatgtcccgcccagcctcggtggacggcagccctgtgagtcccagcaccaacagaacccacgcccaccggcatcggggcagcgcccggctgcaccccccgctcaaccacagccgctccatccccatgccggcttcccgctgctcgccttcggccaccagcccggtcagtctgtcgtccagtagcaccagtggccatggctccacctcggattgtctcttcccacggcgatctagtgcttcggtgtctggttcccccagcgatggcggtttcatctcctcggatgagtatggctccagtccctgcgatttccggagttccttccgcagtgtcactccggattccctgggccacaccccaccagcccgcggtgaggaggagctaagcaactatatctgcatgggtggcaaggggccctccaccctgaccgcccccaacggtcactacattttgtctcggggtggcaatggccaccgctgcaccccaggaacaggcttgggcacgagtccagccttggctggggatgaagcagccagtgctgcagatctggataatcggttccgaaagagaactcactcggcaggcacatcccctaccattacccaccagaagaccccgtcccagtcctcagtggcttccattgaggagtacacagagatgatgcctgcctacccaccaggaggtggcagtggaggccgactgccgggacacaggcactccgccttcgtgcccacccgctcctacccagaggagggtctggaaatgcaccccttggagcgtcggggggggcaccaccgcccagacagctccaccctccacacggatgatggctacatgcccatgtccccaggggtggccccagtgcccagtggccgaaagggcagtggagactatatgcccatgagccccaagagcgtatctgccccacagcagatcatcaatcccatcagacgccatccccagagagtggaccccaatggctacatgatgatgtcccccagcggtggctgctctcctgacattggaggtggccccagcagcagcagcagcagcagcaacgccgtcccttccgggaccagctatggaaagctgtggacaaacggggtagggggccaccactctcatgtcttgcctcaccccaaacccccagtggagagcagcggtggtaagctcttaccttgcacaggtgactacatgaacatgtcaccagtgggggactccaacaccagcagcccctccgactgctactacggccctgaggacccccagcacaagccagtcctctcctactactcattgccaagatcctttaagcacacccagcgccccggggagccggaggagggtgcccggcatcagcacctccgcctttccactagctctggtcgccttctctatgctgcaacagcagatgattcttcctcttccaccagcagcgacagcctgggtgggggatactgcggggctaggctggagcccagccttccacatccccaccatcaggttctgcagccccatctgcctcgaaaggtggacacagctgctcagaccaatagccgcctggcccggcccacgaggctgtccctgggggatcccaaggccagcaccttacctcgggcccgagagcagcagcagcagcagcagcccttgctgcaccctccagagcccaagagcccgggggaatatgtcaatattgaatttgggagtgatcagtctggctacttgtctggcccggtggctttccacagctcaccttctgtcaggtgtccatcccagctccagccagctcccagagaggaagagactggcactgaggagtacatgaagatggacctggggccgggccggagggcagcctggcaggagagcactggggtcgagatgggcagactgggccctgcacctcccggggctgctagcatttgcaggcctacccgggcagtgcccagcagccggggtgactacatgaccatgcagatgagttgtccccgtcagagctacgtggacacctcgccagctgcccctgtaagctatgctgacatgcgaacaggcattgctgcagaggaggtgagcctgcccagggccaccatggctgctgcctcctcatcctcagcagcctctgcttccccgactgggcctcaaggggcagcagagctggctgcccactcgtccctgctggggggcccacaaggacctgggggcatgagcgccttcacccgggtgaacctcagtcctaaccgcaaccagagtgccaaagtgatccgtgcagacccacaagggtgccggcggaggcatagctccgagactttctcctcaacacccagtgccacccgggtgggcaacacagtgccctttggagcgggggcagcagtagggggcggtggcggtagcagcagcagcagcgaggatgtgaaacgccacagctctgcttcctttgagaatgtgtggctgaggcctggggagcttgggggagcccccaaggagccagccaaactgtgtggggctgctgggggtttggagaatggtcttaactacatagacctggatttggtcaaggacttcaaacagtgccctcaggagtgcacccctgaaccgcagcctcccccacccccaccccctcatcaacccctgggcagcggtgagagcagctccacccgccgctcaagtgaggatttaagcgcctatgccagcatcagtttccagaagcagccagaggaccgtcagtagctcaactggacatcacagcagaatgaagacctaaatgacctcagcaaatcctcttctaactcatgggtacccagactctaaatatttcatgattcacaactaggacctcatatcttcctcatcagtagatggtacgatgcatccatttcagtttgtttactttatccaatcctcaggatttcattgactgaactgcacgttctatattgtgccaagcgaaaaaaaaaaatgcactgtgacaccagaataatgagtctgcataaacttcatcttcaaccttaaggacttagctggccacagtgagctgatgtgcccaccaccgtgtcatgagagaatgggtttactctcaatgcattttcaagatacatttcatctgctgctgaaactgtgtacgacaaagcatcattgtaaattatttcatacaaaactgttcacgttgggtggagagagtattaaatatttaacataggttttgatttatatgtgtaattttttaaatgaaaatgtaacttttcttacagcacatcttttttttggatgtgggatggaggtatacaatgttctgttgtaaagagtggagcaaatgcttaaaacaaggcttaaaagagtagaatagggtatgatccttgttttaagattgtaattcagaaaacataatataagaatcatagtgccatagatggttctcaattgtatagttatatttgctgatactatctcttgtcatataaacctgatgttgagctgagttccttataagaattaatcttaattttgtattttttcctgtaagacaataggccatgttaattaaactgaagaaggatatatttggctgggtgttttcaaatgtcagcttaaaattggtaattgaatggaagcaaaattataagaagaggaaattaaagtcttccattgcatgtattgtaaacagaaggagatgggtgattccttcaattcaaaagctctctttggaatgaacaatgtgggcgtttgtaaattctggaaatgtctttctattcataataaactagatactgttgatcttttaaaaaaaaaaaaaaaaaaaaaaaaaaaaa

SEQ ID NO: 3 - DNA, 878 bp, Homo sapiens
  apolipoprotein a-i (APOA1) (1)..(878): accession No.s: M27875, Hs.93194, LocusID:897
tcccccacggcccttcaggatgaaagctgcggtgctgaccttggccgtgctcttcctgacggggagccaggctcggcatttctggcagcaagatgaacccccccagagcccctgggatcgagtgaaggacctggccactgtgtacgtggatgtgctcaaagacagcggcagagactatgtgtcccagtttgaaggctccgccttgggaaaacagctaaacctaaagctccttgacaactgggacagcgtgacctccaccttcagcaagctgcgcgaacagctcggccctgtgacccaggagttctgggataacctggaaaaggagacagagggcctgaggcaggagatgagcaaggatctggaggaggtgaaggccaaggtgcagccctacctggacgacttccagaagaagtggcaggaggagatggagctctaccgccagaaggtggagccgctgcgcgcagagctccaagagggcgcgcgccagaagctgcacgagctgcaagagaagctgagcccactgggcgaggagatgcgcgaccgcgcgcgcgcccatgtggacgcgctgcgcacgcatctggccccctacagcgacgagctgcgccagcgcttggccgcgcgccttgaggctctcaaggagaacggcggcgccagactggccgagtaccacgccaaggccaccgagcatctgagcacgctcagcgagaaggccaagcccgcgctcgaggacctccgccaaggcctgctgcccgtgctggagagcttcaaggtcagcttcctgagcgctctcgaggagtacactaagaagctcaacacccagtgaggcgcccgccgccgccccccttcccggtgctcagaataaacgtttccaaagtggg

SEQ ID NO: 4 - DNA, 2616 bp, Homo sapiens
  aryl hydrocarbon receptor nuclear translocator (ARNT) (1)..(2616): accession No.s: M69238.1, Hs.131494, LocusID:405
atggcggctcctcccactggggggggggtggcgcggcggcggtggcatctgcggccatggcggcgactactgccaaccccgaaatgacatcagatgtaccatcactgggtccagccattgcctctggaaactctggacctggaattcaaggtggaggagccattgtccagagggctattaagcggcgaccagggctggattttgatgatgatggagaagggaacagtaaatttttgaggtgtgatgatgatcagatgtctaacgataaggagcggtttgccaggtcggatgatgagcagagctctgcggataaagagagacttgccagggaaaatcacagtgaaattgaacggcggcgacggaacaagatgacagcctacatcacagaactgtcagatatggtacccacctgtagtgccctggctcgaaaaccagacaagctaaccatcttacgcatggcagtttctcacatgaagtccttgcggggaactggcaacacatccactgatggctcctataagccgtctttcctcactgatcaggaactgaaacatttgatcttggaggcagcagatggctttctgtttattgtctcatgtgagacaggcagggtggtgtatgtgtctgactccgtgactcctgttttgaaccagccacagtctgaatggtttggcagcacactctatgatcaggtgcacccagatgatgtggataaacttcgtgagcagctttccacttcagaaaatgccctgacagggcgtatcctggatctaaagactggaacagtgaaaaaggaaggtcagcagtcttccatgagaatgtgtatgggctcaaggagatcgtttatttgccgaatgaggtgtggcagtagctctgtggacccagtttctgtgaataggctgagctttgtgaggaacagatgcaggaatggacttggctctgtaaaggatggggaacctcacttcgtggtggtccactgcacaggctacatcaaggcctggcccccagcaggtgtttccctcccagatgatgacccagaggctggccagggaagcaagttttgcctagtggccattggcagattgcaggtaactagttctcccaactgtacagacatgagtaatgtttgtcaaccaacagagttcatctcccgacacaacattgagggtatcttcacttttgtggatcaccgctgtgtggctactgttggctaccagccacaggaactcttaggaaagaatattgtagaattctgtcatcctgaagaccagcagcttctaagagacagcttccaacaggtagtgaaattaaaaggccaagtgctgtctgtcatgttccggttccggtctaagaaccaagaatggctctggatgagaaccagctcctttactttccagaacccttactcagatgaaattgagtacatcatctgtaccaacaccaatgtgaagaactctagccaagaaccacggcctacactctccaacacaatccagaggccacaactaggtcccacagctaatttacccctggagatgggctcaggacagctggcacccaggcagcagcaacagcaaacagaattggacatggtaccaggaagagatggactggccagctacaatcattcccaggtggttcagcctgtgacaaccacaggaccagaacacagcaagccccttgagaagtcagatggtttatttgcccaggatagagatccaagattttcagaaatctatcacaacatcaatgcggatcagagtaaaggcatctcctccagcactgtccctgccacccaacagctattctcccagggcaacacattccctcctaccccccggccggcagagaatttcaggaatagtggcctagcccctcctgtaaccattgtccagccatcagcttctgcaggacagatgttggcccagatttcccgccactccaaccccacccaaggagcaaccccaacttggacccctactacccgctcaggcttttctgcccagcaggtggctacccaggctactgctaagactcgtacttcccagtttggtgtgggcagctttcagactccatcctccttcagctccatgtccctccctggtgccccaactgcatcgcctggtgctgctgcctaccctagtctcaccaatcgtggatctaactttgctcctgagactggacagactgcaggacaattccagacacggacagcagagggtgtgggtgtctggccacagtggcagggccagcagcctcatcatcgttcaagttctagtgagcaacatgttcaacaaccgccagcacagcaacctggccagcctgaggtcttccaggagatgctgtccatgctgggagatcagagcaacagctacaacaatgaagaattccctgatctaactatgtttccccccttttcagaatagaactattggggtgaggataaggggtgggggagaaaaaatcactgtttgtttttaaaaagcaaatctttctgtaaacagaataaaagttcctctcccttcccttccctcacccctgacatgtaccccctttcccttctggctgttcccctgctctgttgcctcctaaggtaacatttataaaaaaaaaaaa

SEQ ID NO: 5 - DNA, 1431 bp, Homo sapiens
  creatine kinase, brain (CKB) (1)..(1413): accession No.s: NM001823, Hs.173724, LocusID:6309
gctgttcgcctgcgtcgctccgggagctgccgacggacggagcgcccccgcccccgcccggccgcccgcccgccgccgccatgcccttctccaacagccacaacgcactgaagctgcgcttcccggccgaggacgagttccccgacctgagcgcccacaacaaccacatggccaaggtgctgacccccgagctgtacgcggagctgcgcgccaagagcacgccgagcggcttcacgctggacgacgtcatccagacaggcgtggacaacccgggccacccgtacatcatgaccgtgggctgcgtggcgggcgacgaggagtcctacgaagtgttcaaggatctcttcgaccccatcatcgaggaccggcacggcggctacaagcccagcgatgagcacaagaccgacctcaaccccgacaacctgcagggcggcgacgacctggaccccaactacgtgctgagctcgcgggtgcgcacgggccgcagcatccgtggcttctgcctccccccgcactgcagccgcggggagcgccgcgccatcgagaagctcgcggtggaagccctgtccagcctggacggcgacctggcgggccgatactacgcgctcaagagcatgacggaggcggagcagcagcagctcatcgacgaccacttcctcttcgacaagcccgtgtcgcccctgctgctggcctcgggcatggcccgcgactggcccgacgcccgcggtatctggcacaatgacaataagaccttcctggtgtgggtcaacgaggaggaccacctgcgggtcatctccatgcagaaggggggcaacatgaaggaggtgttcacccgcttctgcaccggcctcacccagattgaaactctcttcaagtctaaggactatgagttcatgtggaaccctcacctgggctacatcctcacctgcccatccaacctgggcaccgggctgcgggcaggtgtgcatatcaagctgcccaacctgggcaagcatgagaagttctcggaggtgcttaagcggctgcgacttcagaagcgaggcacaggcggtgtggacacggctgcggtgggcggggtcttcgacgtctccaacgctgaccgcctgggcttctcagaggtggagctggtgcagatggtggtggacggagtgaagctgctcatcgagatggagcagcggctggagcagggccaggccatcgacgacctcatgcctgcccagaaatgaagcccggcccacacccgacaccagccctgctgcttcctaacttattgcctgggcagtgcccaccatgcacccctgatgttcgccgtctggcgagcccttagccttgctgtagagacttccgtcacccttggtagagtttatttttttgatggctaagatactgctgatgctgaaataaactagggttttggcctgcctgcgtctg

SEQ ID NO: 6 - DNA, 900 bp, Homo sapiens
  delta7-sterol-C5-desaturase (1)..(900): accession No.s: AF187981.1, Hs.287749, LocusID:6309
atggatcttgtactccgtgttgcagattactatttttttacaccatacgtgtatccagccacatggccagaagatgacatcttccgacaagctattagtcttctgattgtaacaaatgttggtgcttacatcctttatttcttctgtgcaacactgagctattattttgtcttcgatcatgcattaatgaaacatccacaatttttaaagaatcaagtccgtcgagagattaagtttactgtccaggcattgccatggataagtattcttactgttgcactgttcttgctggagataagaggttacagcaaattacatgatgacctaggagagtttccatatggattgtttgaacttgtcgttagtataatatctttcctctttttcactgacatgttcatctactggattcacagaggccttcatcatagactggtatataagcgcctacataaacctcaccatatttggaagattcctactccatttgcaagtcatgcttttcaccctattgatggctttcttcagagtctaccttaccatatatacccttttatctttccattacacaaggtggtttatttaagtctgtacatcttggttaatatctggacaatttccattcatgacggtgattttcgtgtcccccaaatcttacagccatttattaatggctcagctcatcatacagaccaccatatgttctttgactataattatggacaatatttcactttgtgggataggattggcggctcattcaaaaatccttcatcctttgaggggaagggaccgctcagttatgtgaaggagatgacagagggaaagcgcagcagccattcaggaaatggctgtaagaatgaaaaattattcaatggagagtttacaaagactgaatag

SEQ ID NO: 7 - DNA, 2263 bp, Homo sapiens
  osteomodulin (OMD) (1)..(2263): accession No.s: NM005014.1, Hs.94070
gcacgagaagaatttaggaatttctgattcatttaaaggatttacaaattcatcaacccctgaaaactaaagcaaattgaacaggaaaaaaaaaaagaagatgggttttttaagtccaatatatgttattttcttcttttttggagtcaaagtacattgccaatatgaaacttatcagtgggatgaagactatgaccaagagccagatgatgattaccaaacaggattcccatttcgtcaaaatgtagactacggagttccttttcatcagtatactttaggctgtgtcagtgaatgcttctgtccaactaactttccatcatcaatgtactgtgataatcgcaaactcaagactatcccaaatattccgatgcacattcagcaactctaccttcagttcaatgaaattgaggctgtgactgcaaattcattcatcaatgcaactcatcttaaagaaattaacctcagccacaacaaaattaaatctcaaaagattgattatggtgtgtttgctaagcttccaaatctactacaacttcatctagagcataataatttagaagaatttccatttcctcttcctaaatctctggaaagactccttcttggttacaatgaaatctccaaactgcagacaaatgctatggatgggctagtaaacttgaccatgcttgatctctgttataattatcttcatgattctctgctaaaagacaaaatctttgccaaaatggaaaaactaatgcagctcaacctctgcagtaacagattagaatcaatgcctcctggtttgccttcttcacttatgtatctgtctttagaaaataattcaatttcttctatacccgaaaaatacttcgacaaacttccaaaacttcatactctaagaatgtcacacaacaaactacaagacatcccatataatatttttaatcttcccaacattgtagaactcagtgttggacacaacaaattgaagcaagcattctatattccaagaaatttggaacacctatacctacaaaataatgaaatagaaaagatgaatcttacagtgatgtgtccttctattgacccactacattaccaccatttaacatacattcgtgtggaccaaaataaactaaaagaaccaataagctcatacatcttcttctgcttccctcatatacacactatttattatggtgaacaacgaagcactaatggtcaaacaatacaactaaagacacaagttttcaggagatttccagatgatgatgatgaaagtgaagatcacgatgatcctgacaatgctcatgagagcccagaacaagaaggagcagaagggcactttgaccttcattattatgaaaatcaagaatagcaagaaactatataggtatacacttacgacttcacaaaacctatacttaatatagtaaatctaagtaaacatgtattactcaaagtaatatatttagaattatgtattagtataagatcagaattgaatttaagttgttggtgacatctgcatcatttcataggattagaacttactcaaaataatgtaaatctttaaaaatataaattagaatgacaagtgggaatcataaattaaacgttaatggtttcttatgctctttttaaatatagaaatatcatgttaaagaaagtgagtgtatcatttctattaacagtaatttttctaaaaatgaggaaggaagtagcattagcagtaaagacccacaggccacgaccctcctgatcactctgaggacaatatttaaatgacaggaaggtatattaatgtaacaagcattcatttaaggaatagaccattttctctgacctcttcttcaggaaagctttcacactggtatttgtgatctcaccattatgacatccatccccctagctcaccacatagcacatagaatgatatttttgatttgtaagaggccatccaggtactaaggacccaaggcatacagattcacaaaattaactaatctttttgcctcagaataccaaaacaacaaaattataaagctgttatttggacaactaaaaaacaccaaactatctcattgcaatttgtattttagcagatttcagcaactatcctaaacaatgttattgtgttccattttaactgggataaatgtttttgtaaaaatacaaccatagaaaggcctctttgttacaaaatgatttgcaaagaaataactgctttgtttgcaagattaaattagtgttggcaaaataaagttctaaagat

SEQ ID NO: 8 - DNA, 3155 bp, Homo sapiens
  very low density lipoprotein receptor (VLDLR) (1)..(3155): accession No.s: D16494.1, Hs.275215, LocusID: 7436
catgggcacgtccgcgctctgggcgctctggctgctgctcgcgctgtgctgggcgccccgggagagcggcgccaccggaaccgggagaaaagccaaatgtgaaccctcccaattccagtgcacaaatggtcgctgtattacgctgttgtggaaatgtgatggggatgaagactgtgttgacggcagtgatgaaaagaactgtgtaaagaagacgtgtgctgaatctgacttcgtgtgcaacaatggccagtgtgttcccagccgatggaagtgtgatggagatcctgactgcgaagatggttcagatgaaagcccagaacagtgccatatgagaacatgccgcatacatgaaatcagctgtggcgcccattctactcagtgtatcccagtgtcctggagatgtgatggtgaaaatgattgtgacagtggagaagatgaagaaaactgtggcaatataacatgtagtcccgacgagttcacctgctccagtggccgctgcatctccaggaactttgtatgcaatggccaggatgactgcagcgatggcagtgatgagctggactgtgccccgccaacctgtggcgcccatgagttccagtgcagcacctcctcctgcatccccatcagctgggtatgcgacgatgatgcagactgctccgaccaatctgatgagtccctggagcagtgtggccgtcagccagtcatacacaccaagtgtccagccagcgaaatccagtgcggctctggcgagtgcatccataagaagtggcgatgtgatggggaccctgactgcaaggatggcagtgatgaggtcaactgtccctctcgaacttgccgacctgaccaatttgaatgtgaggatggcagctgcatccatggcagcaggcagtgtaatggtatccgagactgtgtcgatggttccgatgaagtcaactgcaaaaatgtcaatcagtgcttgggccctggaaaattcaagtgcagaagtggagaatgcatagatatcagcaaagtatgtaaccaggagcaggactgcagggactggagtgatgagcccctgaaagagtgtcatataaacgaatgcttggtaaataatggtggatgttctcatatctgcaaagacctagttataggctacgagtgtgactgtgcagctgggtttgaactgatagataggaaaacctgtggagatattgatgaatgccaaaatccaggaatctgcagtcaaatttgtatcaacttaaaaggcggttacaagtgtgaatgtagtcgtggctatcaaatggatcttgctactggcgtgtgcaaggcagtaggcaaagagccaagtctgatcttcactaatcgaagagacatcaggaagattggcttagagaggaaagaatatatccaactagttgaacagctaagaaacactgtggctctcgatgctgacattgctgcccagaaactattctgggccgatctaagccaaaaggctatcttcagtgcctcaattgatgacaaggttggtagacatgttaaaatgatcgacaatgtctataatcctgcagccattgctgttgattgggtgtacaagaccatctactggactgatgcggcttctaagactatttcagtagctaccctagatggaaccaagaggaagttcctgtttaactctgacttgcgagagcctgcctccatagctgtggacccactgtctggctttgtttactggtcagactggggtgaaccagctaaaatagaaaaagcaggaatgaatggattcgatagacgtccactggtgacagcggatatccagtggcctaacggaattacacttgaccttataaaaagtcgcctctattggcttgattctaagttgcacatgttatccagcgtggacttgaatggccaagatcgtaggatagtactaaagtctctggagttcctagctcatcctcttgcactaacaatatttgaggatcgtgtctactggatagatggggaaaatgaagcagtctatggtgccaataaattcactggatcagagctagccactctagtcaacaacctgaatgatgcccaagacatcattgtctatcatgaacttgtacagccatcaggtaaaaattggtgtgaagaagacatggagaatggaggatgtgaatacctatgcctgccagcaccacagattaatgatcactctccaaaatatacctgttcctgtcccagtgggtacaatgtagaggaaaatggccgagactgtcaaaggatcaatgtgaccacagcagtatcagaggtcagtgttcccccaaaagggacttctgccgcatgggccattcttcctctcttgctcttagtgatggcagcagtaggtggctacttgatgtggcggaattggcaacacaagaacatgaaaagcatgaactttgacaatcctgtgtacttgaaaaccactgaagaggacctctccatagacattggtagacacagtgcttctgttggacacacgtacccagcaatatcagttgtaagcacagatgatgatctagcttgacttctgtgacaaatgttgacctttgaggtctaaacaaataatacccccgtcggaatggaaccgagccagcagctgaagtctctttttcttcctctcggctggaagaacatcaagatacctttgcgtggatcaagcttgtgtacttgaccgtttttatattacttttgtaaatattcttgtccacattctacttcagctttggatgtggttaccgagtatctgtaacccttgaatttctagacagtattgccacctctggccaaatatgcactttccctagaaagccatattccagcagtgaaacttgtgctatagtgtataccacctgtacatacattgtataggccatctgtaaatatcccagagaacaatcactattcttaagcactttgaaaatatttctatgtaaattattgtaaactttttcaatggttgggacaatggcaataggacaaaacgggttactaagatgaaattgccaaaaaaatttataaactaattttgtacgtatgaatgatatctttgacctcaatggaggtttgcaaagactgagtgttcaaactactgtacattttttttcaagtgctaaaaaattaaaccaagcagcttaaccatg

SEQ ID NO: 9 - DNA, 1405 bp, Homo sapiens
  hydroxysteroid (11-beta) dehydrogenase 1 (HSD11B1) (1)..(1405): accession No.s: NM005525.2, Hs.275215
acaattcagaggctgctgcctgcttaggaggttgtagaaagctctgtaggttctctctgtgtgtcctacaggagtcttcaggccagctccctgtcggatggcttttatgaaaaaatatctcctccccattctggggctcttcatggcctactactactattctgcaaacgaggaattcagaccagagatgctccaaggaaagaaagtgattgtcacaggggccagcaaagggatcggaagagagatggcttatcatctggcgaagatgggagcccatgtggtggtgacagcgaggtcaaaagaaactctacagaaggtggtatcccactgcctggagcttggagcagcctcagcacactacattgctggcaccatggaagacatgaccttcgcagagcaatttgttgcccaagcaggaaagctcatgggaggactagacatgctcattctcaaccacatcaccaacacttctttgaatctttttcatgatgatattcaccatgtgcgcaaaagcatggaagtcaacttcctcagttacgtggtcctgactgtagctgccttgcccatgctgaagcagagcaatggaagcattgttgtcgtctcctctctggctgggaaagtggcttatccaatggttgctgcctattctgcaagcaagtttgctttggatgggttcttctcctccatcagaaaggaatattcagtgtccagggtcaatgtatcaatcactctctgtgttcttggcctcatagacacagaaacagccatgaaggcagtttctgggatagtccatatgcaagcagctccaaaggaggaatgtgccctggagatcatcaaagggggagctctgcgccaagaagaagtgtattatgacagctcactctggaccactcttctgatcagaaatccatgcaggaagatcctggaatttctctactcaacgagctataatatggacagattcataaacaagtaggaactccctgagggctgggcatgctgagggattttgggactgttctgtctcatgtttatctgagctcttatctatgaagacatcttcccagagtgtccccagagacatgcaagtcatgggtcacacctgacaaatggaaggagttcctctaacatttgcaaaatggaaatgtaataataatgaatgtcatgcaccgctgcagccagcagttgtaaaattgttagtaaacataggtataattaccagatagttatattaaatttatatcttatatataataatatgtgatgattaatacaatattaattataataaaggtcacataaactttataaattcataactggtagctataacttgagcttattcaggatggtttctttaaaaccataaactgtacaaatgaaatttttcaatatttgtttctta

SEQ ID NO: 10 - DNA, 11580 bp, Homo sapiens
  reelin (RELN) (1)..(11580): accession No.s: U79716.1, Hs.431010, LocusID: 5649
cacgcgtgggctcggcgggggcccgctcccaggcccgctcccgagcccgttccgctcccgtccgccttcttctcgccttctctccgcgtggctcctccgtcccggcgtctccaaaactgaatgagcgagcggcgcgtagggcgscggcggcggcggcggcggcggcggcggcggcatggagcgcagtggctgggcccggcagactttcctcctagcgctgttgctgggggcgacgctgagggcgcgcgcggcggctggctattacccccgcttttcgcccttctttttcctgtgcacccaccacggggagctggaaggggatggggagcagggcgaggtgctcatttccctgcatattgcgggcaaccccacctactacgttccgggacaagaataccatgtgacaatttcaacaagcaccttttttgacggcttgctggtgacaggactatacacatctacaagtgttcaggcatcacagagcattggaggttccagtgctttcggatttgggatcatgtctgaccaccagtttggtaaccagtttatgtgcagtgtggtagcctctcacgtgagtcacctgcccacaaccaacctcagtttcatctggattgctccacctgcgggcacaggctgtgtgaatttcatggctacagcaacacaccggggccaggttattttcaaagatgctttagcccagcagttgtgtgaacaaggagctccaacagatgtcactgtgcacccacatctagctgaaatacatagtgacagcattatcctgagagatgactttgactcctaccaccaactgcaattaaatccaaatatatgggttgaatgtaacaactgtgagactggagaacagtgtggcgcgattatgcatggcaatgccgtcaccttctgtgaaccatatggcccacgagaactgattaccacaggccttaatacaacaacagcttctgtcctccaattttccattgggtcaggttcatgtcgctttagttattcagaccccagcatcatcgtgttatatgccaagaataactctgcggactggattcagctagagaaaattagagccccttccaatgtcagcacaatcatccatatcctctaccttcctgaggacgccaaaggggagaatgtccaatttcagtggaagcaggaaaatcttcgtgtaggtgaagtgtatgaagcctgctgggccttagataacatcttgatcatcaattcagctcacagacaagtcgttttagaagatagtctcgacccagtggacacaggcaactggcttttcttcccaggagctacagttaagcatagctgtcagtcagatgggaactccatttatttccatggaaatgaaggcagcgagttcaattttgccaccaccagggatgtagatctttccacagaagatattcaagagcaatggtcagaagaatttgagagccagcctacaggatgggatgtcttgggagctgtcattggtacagaatgtggaacgatagaatcaggcttatcaatggtcttcctcaaagatggagagaggaaattatgcactccatccatggacactaccggttatgggaacctgaggttttactttgtgatgggaggaatttgtgaccctggaaattctcatgaaaatgacataatcctgtatgcaaaaattgaaggaagaaaagagcatataacactggataccctttcctattcctcatataaggttccgtctttggtttctgtggtcatcaatcctgaacttcagactcctgctaccaaattttgtctcaggcaaaagaaccatcaaggacataataggaatgtctgggctgtagactttttccatgtcttgcctgttctcccttctacaatgtctcacatgatacagttttccatcaatctgggatgtggaacgcatcagcctggtaacagtgtcagcttggaattttctaccaaccatgggcgctcctggtccctccttcacactgaatgcttacctgagatctgtgctggaccccacctcccccacagcactgtctactcctctgaaaactacagtgggtggaaccgaataacaattccccttcctaacgcagcactaacccggaacaccaggattcgctggagacaaacaggaccaatccttggaaacatgtgggcaattgataatgtttatattggcccgtcatgtctcaaattctgttctggcagaggacagtgcactagacatggttgcaagtgtgaccctggattttctggcccagcttgtgagatggcatcccagacattcccaatgtttatttctgaaagctttggcagttccaggctctcctcttaccataacttttactctatccgtggtgctgaagtcagctttggttgtggtgtcttggccagtggtaaggccctggttttcaacaaagaagggcggcgtcagctaattacatctttccttgacagctcacaatccaggtttctccagttcacactgagactggggagcaaatctgttctgagcacgtgcagagcccctgatcagcctggtgaaggagttttgctgcattattcttatgataatgggataacttggaaactcctggagcattattcatatctcagctatcatgagcccagaataatctccgtagaactaccaggtgatgcaaagcagtttggaattcagttcagatggtggcaaccgtatcattcttcccagagagaagatgtatgggctattgatgagattatcatgacatctgtgcttttcaacagcattagtcttgactttaccaatcttgtggaggtcactcagtctctgggattctaccttggaaatgttcagccatactgtggccacgactggaccctttgttttacaggagattctaaacttgcctcaagtatgcgctatgtggaaacacaatcaatgcagataggagcatcctatatgattcagttcagtttggtgatgggatgtggccagaaatacaccccacacatggacaaccaggtgaagctggagtactcaaccaaccacggccttacctggcacctcgtccaagaagaatgccttccaagtatgccaagttgtcaggaatttacatcagcaagtatttaccatgccagtgagtttacacagtggaggagagtcatagtgcttcttccccagaaaacttggtccagtgctacccgtttccgctggagccagagctattacacagctcaagacgagtgggctttggacagcatttacattgggcagcagtgccccaacatgtgcagtgggcatggctcatgcgatcatggcatatgcaggtgtgaccaggggtaccaaggcactgaatgccacccagaagctgcccttccgtccacaattatgtcagattttgagaaccagaatggctgggagtctgactggcaagaagttattgggggagaaattgtaaaaccagaacaagggtgtggtgtcatctcttctggatcatctctgtacttcagcaaggctgggaaaagacagctggtgagttgggacctggatacttcttgggtggactttgtccagttctacatccagataggcggagagagtgcttcatgcaacaagcctgacagcagagaggagggcgtcctccttcagtacagcaacaatgggggcatccagtggcacctgctagcagagatgtacttttcagacttcagcaaacccagatttgtctatctggagcttccagctgctgccaagaccccttgcaccaggttccgctggtggcagcccgtgttctcaggggaggactatgaccagtgggcagtcgatgacatcatcattctgtccgagaagcagaagcagatcatcccagttatcaatccaactttacctcagaacttttatgagaagccagcttttgattaccctatgaatcagatgagtgtgtggttgatgttggctaatgaaggaatggttaaaaatgaaaccttctgtgctgccacaccatcagcaatgatatttggaaaatcagatggagatcgatttgcagtaactcgagatttgaccctgaaacctggatatgtgctacagttcaagctaaacataggttgtgccaatcaattcagcagtactgctccagttcttcttcagtactctcatgatgctggtatgtcctggtttctggtgaaagaaggctgttacccggcttctgcaggcaaaggatgcgaaggaaactccagagaactaagtgagcccaccatgtatcacacaggggactttgaagaatggacaagaatcaccattgttattccaaggtctcttgcatccagcaagaccagattccgatggatccaggagagcagctcacagaaaaacgtgcctccatttggtttagatggagtgtacatatccgagccttgtcccagttactgcagtggccatggggactgcatttcaggagtgtgtttctgtgacctgggatatactgctgcacaaggaacctgtgtgtcaaatgtccccaatcacaatgagatgttcgataggtttgaggggaagctcagccctctgtggtacaagataacaggtgcccaggttggaactggctgtggaacacttaacgatggcaaatctctctacttcaatggccctgggaaaagggaagcccggacggtccctctggacaccaggaatatcagacttgttcaattttatatacaaattggaagcaaaacttcaggcattacctgcatcaaaccaagaactagaaatgaagggcttattgttcagtattcaaatgacaatgggatactctggcatttgcttcgagagttggacttcatgtccttcctggaaccacagatcatttccattgacctgccacaggacgcgaagacacctgcaacggcatttcgatggtggcaaccgcaacatgggaagcattcagcccagtgggctttggatgatgttcttataggaatgaatgacagctctcaaactggatttcaagacaaatttgatggctctatagatttgcaagccaactggtatcgaatccaaggaggtcaagttgatattgactgtctctctatggatactgctctgatattcactgaaaacataggaaaacctcgttatgctgagacctgggattttcatgtgtcagcatctacctttttgcagtttgaaatgagcatgggctgtagcaagcccttcagcaactcccacagtgtacagctccagtattctctgaacaatggcaaggactggcatcttgtcaccgaagagtgtgttcctccaaccattggctgtctgcattacacggaaagttcaatttacacctcggaaagattccagaattggaagcggatcactgtctaccttccactctccaccatttctcccaggacccggttcagatggattcaggccaactacactgtgggggctgattcctgggcgattgataatgttgtactggcctcagggtgcccttggatgtgctcaggacgagggatttgtgatgctggacgctgtgtgtgtgaccggggctttggtggaccctattgtgttcctgttgttcctctgccctcgattcttaaagacgatttcaatgggaatttacatcctgacctttggcctgaagtgtatggtgcagagagggggaatctgaatggtgaaaccatcaaatctggaacatctctaatttttaaaggggaaggactaaggatgcttatttcaagagatctagattgtacaaatacaatgtatgtccagttttcacttagatttatagcaaaaagtaccccagagagatctcactctattctgttacaattctccatcagtggaggaatcacttggcacctgatggatgaattttactttcctcaaacaacgaatatacttttcatcaatgttcccttgccatacactgcccaaaccaatgctacaagattcagactctggcaaccttataataacggtaagaaagaagaaatctggattgttgatgacttcattatcgatggaaataatgtaaacaaccctgtgatgctcttggatacatttgattttgggcccagagaagacaattggtttttctatcctggtggtaacatcggtctttattgtccatattcttcaaagggggcacctgaagaagattcagctatggtgtttgtttcaaatgaagttggtgagcattccattaccacccgtgacctaaatgtgaatgagaacaccatcatacaatttgagatcaacgttggctgttcgactgatagctcatccgcggatccagtgagactggaattttcaagggacttcggggcgacctggcaccttctgctgcccctctgctaccacagcagcagccacgtcagctctttatgctccaccgagcaccaccccagcagcacctactacgcaggaaccatgcagggctggaggagggaggtcgtgcactttgggaagctgcacctttgtggatctgtccgtttcagatggtaccagggattttaccctgccggctctcagccagtgacatgggccattgataatgtctacatcggtccccagtgtgaggagatgtgtaatggacaggggagctgtatcaatggaaccaaatgtatatgtgaccctggctactcaggtccaacctgtaaaataagcaccaaaaatcctgattttctcaaagatgatttcgaaggtcagctagaatctgatagattcttattaatgagtggtgggaaaccatctcgaaagtgtggaatcctttctagtggaaacaacctctttttcaatgaagatggcttgcgcatgttgatgacacgagacctggatttatcacatgctagatttgtgcagttcttcatgagactgggatgtggtaaaggcgttcctgaccccaggagtcaacccgtgctcctacagtattctctcaacggtggcctctcgtggagtcttcttcaggagttccttttcagcaattccagcaatgtgggcaggtacattgccctggagatacccttgaaagcccgttctggttctactcgccttcgctggtggcaaccgtctgagaatgggcacttctacagcccctgggttatcgatcagattcttattggaggaaatatttctggtaatacggtcttggaagatgatttcacaacccttgatagtaggaaatggctgcttcacccaggaggcaccaagatgcccgtgtgtggctctactggtgatgccctggtcttcattgaaaaggccagcacccgttacgtggtcagcacagacgttgccgtgaatgaggattccttcctacagatagacttcgctgcctcctgctcagtcacagactcttgttatgcgattgaattggaatactcagtagatcttggattgtcatggcacccattggtaagggactgtctgcctaccaatgtggaatgcagtcgctatcatctgcaacggatcctggtgtcagacactttcaacaagtggactagaatcactctgcctctccctccttataccaggtcccaagccactcgtttccgttggcatcaaccagctccttttgacaagcagcagacatgggcaatagataatgtctatatcggggatggctgcatagacatgtgcagtggccatgggagatgcatccagggaaactgcgtctgtgatgaacagtggggtggcctgtactgtgatgaccccgagacctctcttccaacccaactcaaagacaacttcaatcgagctccatccagtcagaactggctgactgtgaacggagggaaattgagtacagtgtgtggagccgtggcgtcgggaatggctctccatttcagtgggggttgtagtcgattattagtcactgtggatctaaacctcactaatgctgagttcatccaattttacttcatgtatgggtgcctgattacaccaaacaaccgtaaccaaggtgttctcttggaatattctgtcaatggaggcattacctggaacctgctcatggagattttctatgaccagtacagtaagcccggatttgtgaatatccttctccctcctgatgctaaagagattgccactcgcttccgctggtggcagccaagacatgacggcctggatcagaacgactgggccattgacaatgtcctcatctcaggctctgctgaccaaaggaccgttatgctggacaccttcagcagcgccccagtaccccagcacgagcgctcccctgcagatgccggccctgtcgggaggatcgcctttgacatgtttatggaagacaaaacttcagtgaatgagcactggctattccatgatgattgtacagtagaaagattctgtgactcccctgatggtgtgatgctctgtggcagtcatgatggacgggaggtgtatgcagtgacccatgacctgactcccactgaaggctggattatgcaattcaagatctcagttggatgtaaggtgtctgaaaaaattgcccagaatcaaattcatgtgcagtattctactgacttcggtgtgagttggaattatctggtccctcagtgcttgcctgctgacccaaaatgctctggaagtgtttctcagccatctgtattctttccaactaaagggtggaaaaggatcacctacccacttcctgaaagcttagtgggaaatccggtaaggtttaggttctatcagaagtactcagacatgcagtgggcaatcgataatttctacctgggccctggatgcttggacaactgcaggggccatggagattgcttaagggaacagtgcatctgtgatccgggatactcagggccaaactgctacttgacccacactctgaagactttcctgaaggaacgctttgacagtgaagaaatcaaacctgacttatggatgtccttagaaggtggaagtacttgcactgagtgtggaattcttgccgaggacactgcactctattttgggggatccactgtgagacaagcggttacacaagatttggatcttcgaggtgcaaagttcctgcaatactgggggcgcatcggtagtgagaacaacatgacctcttgccatcgtcccatctgccggaaggaaggcgtgctgttggactactctaccgatggaggaattacctggactttgctccatgagatggattaccagaaatacatttctgttagacacgactacatacttcttcctgaagatgccctcaccaacacaactcgacttcgctggtggcagccttttgtgatcagcaatggaattgtggtctctggggtggagcgtgctcagtgggcactggacaacattttgattggtggagcagaaatcaatcccagccaattggtggacacttttgatgatgaaggcacttcccatgaagaaaactggagtttttaccctaatgctgtaaggacagcaggattttgtggcaatccatcctttcacctctattggccaaataaaaagaaggacaagactcacaatgctctctcctcccgagaactcattatacagccaggatacatgatgcagtttaaaattgtggtgggttgtgaagccacttcttgtggtgaccttcattccgtaatgctggaatacactaaggatgcaagatcggattcctggcagctcgtacagacccagtgccttccttcctcttctaacagcattggctgctcccctttccagttccatgaagccaccatctacaactctgtcaacagctcaagctggaaaagaatcaccatccagctgcctgaccatgtctcctctagtgcaacacagttccgctggatccagaagggagaagaaactgagaagcaaagctgggcaattgaccacgtgtacattggagaggcttgccccaagctctgcagcgggcacggatactgcacgaccggtgccatctgcatctgcgacgagagcttccaaggtgatgactgctctgttttcagtcacgaccttcccagttatattaaagataattttgagtccgcaagagtcaccgaggcaaactgggagaccattcaaggtggagtcataggaagtggctgtgggcagctggccccctacgcccatggagactcactgtactttaatggctgtcagatcaggcaagcagctaccaagcctctggatctcactcgagcaagcaaaatcatgtttgttttgcaaattgggagcatgtcgcagacggacagctgcaacagtgacctgagtggcccccacgctgtggacaaggcggtgctgctgcaatacagcgtcaacaacgggatcacctggcatgtcatcgcccagcaccagccaaaggacttcacacaagctcagagagtgtcttacaatgtccccctggaggcacggatgaaaggagtcttactgcgctggtggcaaccacgccacaatggaacaggtcatgatcaatgggctttggaccatgtggaggtcgtcctagtaagcactcgcaaacaaaattacatgatgaatttttcacgacaacatgggctcagacatttctacaacagaagacgaaggtcacttaggcgatacccatgaagaatcaaaaagtttattttttttcttccaacatgtgatgtgttgctctccattcttttaaatctcgcactacatctgatatcaggaaatatctgtgaaggacttggtgattacctgaaagcccttctcaagaccgagtgtacaccactttcccacactgtgaactaatgacaagtgacttatttgctcataagtaaatgtcttcatgttgatgtgtccgtgaaagttgtgatctgttgtaatatcagttacagtggcagtattgacaataagaaacagtttaacagaaaaatgaaatttaagcacaaaaaatttaagagattttatgtttaaaatggcatttagcacagtatttaacattcttggtcacaaagctatttaagtggactgtatttcagctatgtctcatgttttatatgattaaattatcattgtttgtcctttatgtattctcttctacaatacaacacattgaaactgtatttacttgttatgttgtaatattttgctgctgaatttggggctacttatattctgcagaaaattaattgaaatacctattcaagaagatagttgtaaagatattgtatctcctttaatatactccttaaaaatgtatgttggtttagcgttgttttgtggataagaaaaatgcttgaccctgaaatattttctactttaaattgtggatgaagaccctatctcccacaaataagttcccatttccttgtctaaagatctttttttaagtgttctgtggctgatttactaacagtaactgccattttttgtctgtgataacagagtgatttgtaaaacagtggttgttttttcattgtgttttcttcgtggattgttttttctgcgggtcatattcataccttctgatgaagttgtacaacaccagcaacattataatggccctgtagctctgaatgctatttgtgtaactgaaaggttgcactctagggtgaaccaagctataaaagcccatgcttaaataaaaattatgtccaaaagcc

SEQ ID NO: 11 - DNA, 2472 bp, Homo sapiens
  atp-binding cassette, sub-family c, member 10 (ABCC10) (1)..(2472): accession No.s:  AL133613.1, Hs.55879
acgcggtgctgctgatggaggccgggcgcctcatccgggctggacctccctctgagattctgccactggtacaagctgtccccaaagcctgggctgagaatggacaagagtctgactcagccacagcccagtcagtacagaacccagagaaaacaaaggaggggctggaggaggagcagagcacatctggtcgcctgctgcaggaagaaagcaagaaggagggcgccgtggccttgcacgtgtaccaagcttactggaaggccgtgggccagggcttggccttagccatcctcttctctctgcttctcatgcaagccacgcggaacgctgctgactggtggctctcccactggatctctcagctgaaggctgagaatagctcccaggaggcgcaaccctccaccagcccagcttctatggggctcttctctccgcagctgctcctcttttcccctggaaacctctacatcccagtgttcccactgcccaaagctgcccccaatggctcctcagacatccgtttctacctcaccgtgtatgcgaccattgctggtgtaaattccctctgcacccttctccgggcagtgctctttgcagcaggcacccttcaagcagctgccactctgcatcgccgcctgctgcatcgagtccttatggcaccagtgactttcttcaatgccacacccacgggccggatcctaaaccgcttctcctctgatgtggcctgtgcggatgacagcctgcccttcatcctcaacatcctcctggccaacgcggcaggcctgctggggctcctggccgtgctgggctctggcctgccctggctgctgctcctgctgccgcctttgagcatcatgtactatcacgtgcagcgccactacagggcctcctcacgggagctgcggcgcctgggcagcctcaccctgtctccactgtatagccatctggccgataccttggctggcctctctgtgctccgggccacaggggccacctacaggtttgaggaggagaacctgcgactccttgagctaaaccagaggtgccagtttgccaccagtgccacaatgcagtggctggacattcggctacagctcatgggggcggcagtggtcagcgctatcgcaggcatcgctctggtgcagcaccagcagggcctcgctaacccagggctggtgggcttgtcgctgtcttatgccctgtccctgacgggcctgctctcgggcctggtgagcagcttcacacagacagaggccatgctggtgagcgtcgagcggctggaagagtacacctgtgacctgccccaggaaccccagggccagccactgcagctgggcaccggctggctgacccaggggggcgtggagttccaggacgtggtgttggcgtaccggccagggctgccgaatgccctggatggagtgaccttctgcgtgcagcctggagagaagttgggcatcgtgggccgcacaggctccggcaagtcttccctgttgttggtgctcttccggctgctagagcccagttcagggcgagtgctgctggacggcgtggacaccagccagctggagctggcccagctcagatcccagttggctatcatcccccaggagccctttttgttcagtgggactgttcgggaaaacctggacccccagggcctacataaggacagggccttgtggcaggccctgaagcagtgccacctgagtgaggtgattacatccatgggtggtctggatggtgagctgggtgaggggggccggagcttatctcttgggcagaggcagctgttgtgtttggccagggctctcctcacagatgccaagatcctgtgtatcgatgaggccacagcaagtgtggaccagaagacagaccagctgctccagcagaccatctgcaaacgctttgccaacaagacagtgctgaccattgcccataggctcaacacgatcctgaactcagaccgggtgctggtgctacaagcggggagagtggtagagctggactccccggccaccctgcgcaaccagccccactccctgttccagcagctgctgcagagcagccagcagggagtccctgcctcactcggaggtccctgagcccaatcccacaccctgcagagttctcccctctctctgatccaggccgggcctatacagaggtgctggctgcttgtttacattctcctctggggctctacctctccacacttccccagaagggaaaagggcaccctggattactctttggaaatcactccttggtgggcagcatcctgaggcttccccagaaccaggcctctgctctggccctcttgcatctggaacgccaggtgggtttttctggcataggagcccacttgcattttcatagttttatttgataaaattccatcttacattctgtgtattaaaaaaataatatttctggaaaaaaaaaaaaaaaaaaaaaaaaaaaaaaaaaaaa

SEQ ID NO: 12 - DNA, 17133 bp, Homo sapiens
  cyclophilin 40 (1)..(17133): accession No.s: D63861
attatgaaaaaatttaaatgtgcaaaataaagaagagtagtataataaactcccatgcaccaatcatctgcctggcccttatgtttcatccacaacccaacccacttacctgactccaggttattttaaaacaacttcaggcactatagcatctaattttcagtaatttaaaaaagagtgtataagaatgctttagagattacaaggcaaatgcttacacattatctttttccattctcataccctgttctttggcactttaccgaaaaggaaatgagaagggttcagagaaattaaatgacttttctttggtaacatgcctagtatacatgtagtcagaacttgaagcttttgctttttttttttcttttttaacatcaactttcgtgcttagtccagtgtataacatcacaggcaaattcaaattgagaataggaatcagttgttctttaaccgtaacccttctaacttttacttatcctaagaccgggtagcaagtagggcaggagccttcatctagagggatggtgacagctctgataggggaaaattagcactggtctttccttccaaaaagccactctggctgctgctgttgacacaaggctcctggcttttgagacattatttgagtgctggattccaatactttttactttctcataagaaaaaaaaatgtgaagcatctaaggatatctcctgccttattgataaagtaagcctcaggctgaatccaaattgctgagctccaatagaactacagggcaaagcatctacacagggaattgccactcttctccaaaattaggctttattaagaggcaaggctatgttctcctcatatatatgtgtgtgtgtgtgtgtgtgtgtgtgtgtgtgtgtgtgtgtgtaaaaagtaaatgttttacacagatccccataagggaaaagtgggctatagtaatacagtatttttttgtttttcttttttttgggggggggggacagtttcgctctgtcacccagtctggagtacagtggcgcgatctcggttcactgcaaccgccgcctcccgggttcaagcgattctcctgcctcagcctcccgagtagctgggactacaggcaagcaccaccacgcccgggtgattttttttttttttatttttagtagagacgggtttcatcatgttggtcaggctggtctcgaactcctgacctcaaatgatccgcccgcctcggcctcccaatgtgctgggactacaggcgtgagccaccgcgccccgccaaatacagttttatcaggaatcaaaactgtgctctcttctggactctcagctttagctgtttggagcgtttagtctaagccttaccacttacattgtaatgtgaagatcaaattgtaacgacatggcaataataaggctcctattggttgggtaccaccagtttatgccaggcattgtactgattcatgtctttaatcctcaaaacgaccttccgaggtcagcgtttttattctttttccagaggagcaaactgagtttctgagaagtcacacccaacttggtggcagagctgacgctggcatggggttgactccaaagctctctacgccacgagggtgggaaagacaacgaaacacaagcgagaagaataatgagaactgggatcgcaacttcattaaatgagaagccaggaacaggtggcggagggcacgcggttcgctgcacggagtcgctcaggctctttgaaacaccgcgcgggggagcggggcggtgccggaagtcaggccatggcttccggttcttgcgtcggaagtggccggtcagcgtcgctgccggtctccggcggagacggactctggagtttgggcggcccgggcggccactaggtactctgatattccgtactaaacacgtctgcaagtcaagatgtcgcacccgtccccccaagccaagccctccaaccccagtaaccctcgagtcttctttgacgtggacatcggaggggagcgaggtgagcggagtctgacgctcgcggaaaagccccgaggaggcgggggttcccgggatttgggggattccaagggcggaatgcggctccggccggtgactgctcagtttcgcggaggggatggctgcctaggctggtccgccggagcaggcccggagatctagggctagatcgatccagcgcccttgtatcaatgccatcggtggtgcggaagtttctggaaatttctagttcgggaattgtggcgtcctttaggtttgcctcctgatttggtggcacttccacgccacctttgcactaccaagttagcatgaaatattttatgtttgcaatgggacagttcggaaagcatatcctgggatatgcgtctgctgggccccaggaaactatatttgccacatgagataatatatcagcacgtgctgtgttatttatacgttaaagggacttgtttgctcattgcttttgccttattactgattcttaatttagaggtccgttcagatgagcaaacattttctcttaatttgccattgggaaaatgcgctcaacgtagtgatggtgttgcctaggttacatagccgctcagaagttcctaaggcctggtgaattagggagcgtgttgctttgtaactggattggccttgttctggaacacgttggaattgctggccaggcaatgtgtttgaatgcatgtacaggacacacacacgtttacacgtacattcagtttgttgcaactagctagggctaggtttaatctcacctgtcttagctgctatctagaggaggaatttttacagcttttgcttcagaggttgcatgaggcagtttgctcagagcacaaaggctgcaggtatacgtaacacgtggcaagtccgcccacccaaagactgtttaattttctcccgttggttgcttggtgattggaaattctcagtacctcttgaagaaattactcaggatttaaaactatttgtatttaatgatatctcttacatggtgctaatcttttggctactataattggttatgatccttagtgtaatgtttcaaatctgtttatatacatacatgacagtaggtagactaaatttgaatattagaataaaataagattcactaattctagtgagtatattcaaaggaaatgaagtttgtatgtcaaagaggtatctgcactcccatgttcattgcagcattattcatgatagccaagataatggaatcaaactaggtttccatctacagatggattttttttaaaatttgatatatgtgcacagtggagtactattcacccataaaaaataatgaaatcttgtcacttctgacaacatgaattaatatggaggacattatgttacatgaaataagctgggcacaggaagacaaggcatgatctcacttacatgtggtttctaaaaagttgaccttgaagtagagaatggaatggtggatttcaggggttgggtagatgttgatcacgagagacctaatttcagttagaaagggggaataaatttaagagatctattgtataacataatgactatagttagtagcaatgtgttgtgttcttgaaattgcaaaaaagaaaaattacagtaaaggggaacttggtaattcatgattgatctgctaccataattataccaaccttctttttatcatttgtctatttggttgttttgcatactgacaagattttcttttcttttagttggtcgaattgtcttagaattgtttgcagatatcgtacccaaaactgcggaaaattttcgtgcactgtgtacaggagaaaaaggcattggacacacgactgggaaacctctccatttcaaaggatgcccttttcatcgaagtatgtgtaaattttcttaatcttgttattcttcatacagacaagtcctgttctttaggatttggggaagaaaacactaagtaggaagtgaagcttaaaaagtactattagcgtccatgtctgaggcagtaacgcagtttcgtaaaggttaggctgtgcgaggtggaattacttatggtactaaggtttatctatagagaaatggactcccctagctttacccatcctctcattctccttcactctaagatgatttgattgagaaaggaaggccgtagtcaaccaaccttaggtagcttcattgcctggtgacaaaaaagttatgcatagaccgggcgcagtggctcacgcctgtaatcccagcactttgggaggctgaggcgggtgaatcacgaggtcaggagatcgagaccatcttggctaacgcggtgaaaccccgtctctactaaaaatacaaaaaataagccgggtgtggtggtgggcgcctgtagtcccagctactcgggaggctgaggcagtagaatggcatgaactcagaaggtggagcttgcagtgagccgagatcacgccactgcactccatcctgggcgacagagtgagactctgcctcaaacaaacaaacaaacaaacaaacaaaaaaatgcataatttttgggcctgagtgcttgggaaggcagcagatttgaagattcagtgttttgggcacatgggtgatagtgtggtcaaaatatgccatttcatactgcttattacactttgtaatgaatcatacttttgtttagtgataatggttctcccaatagactgcaggctctatgagttcaagaactgtatgttttcaccattttgtttttggcatctaatacagttattgagtaagaactcagtaagtatttgtttaataaataggcaaataagcaataatcacaagagcaacattttttaaacgatttattaagaaaaaattaactttttaaaaatatttaaaatgtttactttcatgtttaataaaaacttgaaatatgctaataaactatatgcagaaaatatttaacatagcaagtgtgagactgctatctttagaaaggtctgcctgcaagagtagcacttgtttggagtctgggaacttgacacttgtaccatttcctaaatagtaatggtgatttactatgcctagcctatttgtacaaacatgaatgtgtgctctcttttggggagtctggaattttggtacatgctaggtagagtgtgcccaataaataccttgggtgctgagtctctaattggctctcctgggcagaaatactgtgtacatgttgctgcatttttgttgctgggggaagtgtgtgttctgtagcacttcatgggacggagaaagcataaggaagcctgcacatggatttttccagactctgcctgtgtctttcccgtcatctcgctgtgtatccttaccactgtgatccaaccacatactgatttgtgtgagctctagggttctctgaacatgaaagcaatcttggtaacctttgacacaaagtgatatatttgctgaaaattttccattagggtagaacaaatctactgggaatcattggtctgtattcagcagacattattgagtaactaatatgtactatgtgtacatgcacatagttataaggatgtaaaacaatacagttggtgtacttaaggagatcattgctggaaggggcagatcataatgccatatgttatgtaggcagagtcaagatactatgggagaaaaattaggacatacagcttagggatttcagtgacagttttataggggaggtatcatttgaaccgattttctgaatgttagcagggatcaggcagtgaaaataggttggattcagatggtgaaaagcctgaagcgtttggagttgcggagacgggtggggagggacaaacaggagagagacatgactagagtcatgcactacaaagttgtcttacgtacgtatccattagtaagcattgctaaaggcatccatgtctcagtcactaatagccattttccttttttgtagttattaagaaatttatgattcagggtggagacttctcaaatcagaatgggacaggtggagaaagtatttatggtgaaaaatttgaagatgaaaatttccattacaaggtaaagtagagaaaatgcatgttattgctgataaaaagattgttatatatctggaatacttgttggattaagacaccaaaaaatgtttcaagtgtgcttagattctccatttcttgtaataggaatcacttttgtaaataatggttctttaatatggaaaagttttcattcagtaatgattaattcagcattatttcattgtgatccagtttttatatgcttcagttaagccagtgagtttttaaatgcgaccagcatctggcaaaattgtttccaggaaaaatgtttccattgttggaaggatggtaacttgtgcatccttatccttgaatgtgaagagcaacaaaaccatcactaatatccaggatgtcaggggatttgcacactagcagatatagttaaatgtccaagctcctaaaggacttcagtggtgcctgtgccttcttgtcttcgttgtcccaagatgtaattggggtatattgcatcattcaagttataagaatggacatgtaagtacaaaagtaaagtgatatttttggaaataaggaatatgagcaagggtattaggataatttgaaaaaatgtcgtcagtcttccagtcagtgtttattgagccactatcactggcaccaaagggtttataaaaatgaaaggccttgatgacaaggaatttataatcctacctcagagacaagattaagatacatgggactactggagaataatagtatataaataaatgctaaattgattgaatatccttgcttgtataacattgctaatactgtctatatactgcaggagaaagatgtgatttatgcagtctgaattattatggaagtcattgaggaggaatggctacttgggctgtgcagactgggtcttgcaaggcggcaacatgtctgagatttggttaggcaggaactgtagtattgatgcagaatttaaaaagggacgtcggtgaggaaagacaaaggcaagagacgttgaggaaataaagttctagttactgttgtaccaaaggaagctaccagaaggatgaaaactaaaggtgatgtgatgatcacattgacatagagaaaaggggcctatagacaagacacatgattcttgctttctataaacgtggtggccttaaaatctgaatttgatttagactgaggggagtaaaaggcattttggtggggtggggggtgtcatgaaacattatataacatgagagttacggtgcatgcaccaacaaggaatacatttagaaagcctaggagataaagtgaaaaggttaagaaattgggtttcatagatcctttgacaggattatgccaaggtagaattttgatttcaagatgtatgcagcagtttcttttgagcactctccgaagaggtgattcatctgggatgaaaacctaatccaaatcctgtatgatttggattcttttgagattaggaaagtaccaaactgaatgtcttgggtaaattcagtatcccattattgttccagtttattgatgttttgtaaaggaagacttatactgtaggcatatttatgaatttggaagaccgttcaggtcttcccagaaaaaaagagcattcatcataaagagggcaaaatatattacaagagtttcataatgctgcatcttcattttaaaggtgaagtgtaagtattttctcatggccaatttagaaataaccctccccccgactattgtttctgttacctatttactttgataaggttttttaaagtttaaagtgattaagtgccccatgttttgtgaattaaaggttgcagtttataaaaaaataaaaagtaattaaaaaattttataagtgaaaagtaaaaaaaagtagtttgatctaaatggtagtatagtgcaccccagttttatgttcagtaaaagaacagttcagactaacacacaattcagaaaagaacacatctaaccttggttttcttttaatttttatttctacagcatgatcgggagggtttactgagcatggcaaatgcaggccgcaacacaaacggttctcagttttttatcacaacagttccaactcctcatttggatgggaaacatgtggtgtttggccaagtaattaaaggaataggagtggcaaggatattggaaaatgtggaagtgaaaggtgaaaaacctgctaaagtaagtaaaaagttacagtgaaatacacttattatcttagttgctatctttttgagacggagtctcgatctgttccaggctggagtgcagtggtgcggtctcggctcactgcagcctctgtctcccaggttcaagctattctcctgcctcagccttctgagtagcagggattacaggcgcgcgctacaacacccggctaattttttctgtatttttaatagagacggggtttcaccatgttggccaggctggtctcaaactcctgaccttgtgatccgcccacctcggcctcccaaagtgctgggattacaggcatgagccaccgcacccagcctgttagttgctatcttaaagaaatataagtaaaaggatcaggtgattattagctggaaaaatgttataataattttgggtataggagccaggatctgccactttttttttttttttttaacttttctacaatgggaaagacaattagggtagttttaaaggagatttttattatttcaactttcatttggtgatctttgctagtttacgttaagtcttcctatacctgcaaaactgttcagttggtatgtatagtagtacatagtggaatgaggataataagcccaaaatcttgtctggattgtagcattaactagaggcttggccttgactttgttacttaacttttccacacgtgttttctcctgtctaaattacttatgggtttagactagattatctctgaagacccttgtgtacttaatgtctgtgaatcaaaatgaccttaatattggctgggcatggtagctcatgcttgtaatcccagcactttgggaggctgaggtgggaggatcacttgagaccaggagttggaaaccagctttggcaacatagtgagatgctgtctctattaaaaaaaaaagaaaaaagaaaaacccctaaacgaccataatactacccagcctaagtgacagggttgtgagtgggagttggaagctcagttacttgtaggaggtaggctgtcactcagtgtatgacaagaatagtagtaaaccggaagctcatgccccacctaatgccacttacatagacaatgataaaattgccaacttattctgtgtttattgagctcctgaatagcaataaaatgcttatgtaaatactaacattgtcgtattagttggaatgtataaaaacagcattatagtacataaatgagccttctcacataaatctgtgaattggacagtgctgcacatgacttcagctgtatagcttttatctctcattattacgatagtgcacttctacaatttagggttatttttacagttgtgcgttattgcagaatgtggagaattgaaggaaggagatgacgggggaatattcccaaaagatggctctggcgacagtcatccagatttccctgaggatgcggatatagatttaaaagatgtgagtactttcagattagtcaaactttaattaatttagtaagtgaaaatatttagtactaaaagtttgagcttttgtttcagtctctcatatgatagaatctagcattaaaccacattacttactaaaatccaacatatttgtatttttttatacaggtagataaaattttattaataacagaagacttaaaaaacattggaaatacttttttcaaatcccagaactgggagatggctattaaaaaatatgcagaagttttaaggtaatattatttctaacaaattatttttaagaaattataaattgaattataaactaaaattaagaattgctcattatatttttgcaaattacttgtggaataaccaggtgtgttgaaatagttgcatttccttttttttccctcagcttgttttgagaaatttcaaaagacagaagttgaacgagtagtacataattactcataagttttacttacattcaccaatttttaacttttgctgtttacgtttttacagaactattttgataggaagttgttgatactgtgatactttaccctaagtatttcagcacgtatttcctaagaaacaaagacattctgcataagttcaataccgttaaaacaccccaaagtaatattgatagataatatcaatccatatttaggctgggcatagtggctcatgcctataatcccagcactttgggaggccaagctgggcggatcacctgaggtcgggagttcgagaccagcctggccaatatggtgaaaccccatctctactaaaaatacaaaaattagctgggctggtggcgcacgcctgtaatcccagctacttgggaggctgaggcacaagaattacttgaacccaggaggtggaggttgcagcaagccgagattatgccactgcactccagcctgggcgacagagtgagattctgtctcaaaaaaaaaaaaaaaagtaatccatattccaacttccccagttgtttcaatttcttagaaaaatcaagggtccaaactaagattatgtgttatatttagtggtagtatctcttacgtttcctacctcccctggttttttattcatttgcatttttgtggagtccaagtcagttgtttttatagacttccatctgtatgtgtttgtttccttaagattagtttgaggtgaaatattttggcaagaagacttaggtgttgttttgtattacctatgatatcacatcctgaagacacatttcgctttggcctgtttgagttcacacacatggttaaagtagtgtcagccacaagcatttgttagtctgaggtggtatcgtgaaattgtatgaatttctagtccccaacaacttttcacacagtggatcttagcatcattgaaaatccatgcctgaatctgttatactgaacttctaagtttatcatcgtacagttattaactagcattcttctgtttgcgagagcctcccgcatattttttaagtatcactatagacctgtggatatttttcttttctttttttttccttttatagaaacaaggcctcctttatattgcccaggctggtctggaacttttgggcccaagcaatcctccctcctcaccttcccaagtagcagggactagaggatatcttatgggtagttttcaattccgtttgttagtacgctattattgtcattctttttcatgcccaaagggttccaaatttgttcagtggaaggcccctttcctttggcatgttcctattagtctgcgagcacttgcttgctctaagctcatcttgccttactttcagatctgatatggcagtttctccaaggacctctgatttcttttagagaaagaaaactttagaaaccaaattctgggggccaggtgtgctcagttttggggcccttttcagggacaatgcaaaatcaacacaatagagttctccttcatctttcctctactgaattcccttctcctattatgagaatcctggttccaaacataattatgttggaaagtacatagtggggacctgagttttaaaaatagaaaagtgttactagtgcataattagatttgggaattgctcttaaattggcctctttgaacactttggggaacaaaaacaattttttttaagccttcttaaaaattttaaaaagtgtgatcattaagattattaatagcatttttagagctttttatatcagaaatgacataacacttctggacatagagaagagtaattcctgtttatgtggtctttcatactgcttttattaatgcattctgcagatacgtggacagttcaaaggctgttattgagacagcagatagagccaagctgcaacctatagctttaagctgtgtactgaatattggtgcttgtaaactgaagatgtcaaattggcagggagcaattgacagttgtttagaggtaagtctgtttgattttgaactttttgaataagttggattaagacttagtttgaatagtagcaacttttatatacattaatatatcttattgcataggacctaatgaggcttaagaaaacattttgtttctaaatattttggaccctcagttctttctctacattcattttgcttataactctgtgtcacttaacagctatgaagatccttgcctttttttctcaaagcacatatatcagctcatgtattcacttaagagcacctattgtgtgttaggcattagaagacaaagtcagaaatgattaagatgtgggttatggagtcagtcaggcatggcttttttcttcttcttttttttttgagacggagtcttactctgttgcccaggctggagtgcagtggcgcaatctcggcttactgcaacctctgcctcccgggttcaagtgattctcctgcctcatcctcccaagtagctgggattacaggcatgtgccaccatgcccagataatttttgtatttttagtagagacagggtttcaccatgttggccaggctggtctcaaactcctgatctcaggtgatccacccgccttggcctcccaaagtgctaggattacaggtgtgagccaccgtgaagtagttatagagagttatataacacaatgtaaggcatttagtgtagtgcctggcacattttaagcacctaacagagacgagttattttaattaaaagatccataccctcaagaagcttaataagtgattcaggataggagggggtcagtttcaatttaggttcatcaggacttgtgtatggagaatgggttctattggaacaggtcatttatctttaggaggtcatccaggtatgctaactgataaagctagaaaggtggcagttttaccttcctcaaatagagcaattatgactctcttccctgttgtatagtttgaaaagttttccaaatgaaactttaagaattttacatattaagccaggcacctagactagctatgctcagagcaagtagaactaaaatgagatcctaattttgtagggtagatggaataagggataggaatatatttagaagggatcatacaacagaggaaaaaacttatcaaaagaaaagatgggtcttcactctgggtttttttttgttctctgtcacccatgctggagtgcagtgatgcaatcaaagctcactgcagcctcaacctcctgggctcgggtgatcctcctacctcagcctcctaagtagctgggactacagacccttgccaccatacccagctgatttttaaattttttgtagagatgggtttttgacgtgttgcccaggctggtctcttaactcctgggctcaagctgtccacccgccttggcctcacaaagtgctggtattatagttaagagcctctctgcccagcctcgatctctttttgacctgtgaggcaggtaaaatctgagtattggccattaaaagatgttacataaacaaaagataattttaaaatgtttgttctaggggagagacctgatgcataaagtctcttaggttaaaagacctgttgtaggtaagaacctaggttgggtatggtggttcatgcctgtaattccagcacttagggaggccacggcggcgggcagatcgcttaattccaggagtttgaaaccagcctgggcaacatggtgaaaccctgtctctaaaaaaaaaaaaaaattagtctggtgtggtggcacatacctgtagtcccagctacttggaggctgaggtgggaggagcacttgagcctggggggttgaggcagcagtgagctgtgatcaggccactgcactccagcctgggccacagagtgagaccttgtcttaaaaaaacaaaaaacaaaaacttaagagtttataacttaagagttattaagttattaatgttcctaaaaaacttataattcaagtaaaaagtgtatacaaatgtttcttcaaaatgattttatcttaaaagtgttagttcaggcccattcgggagattgaaaccacagtggggagcatattggaaactagagaaatgtctttctcctccatgtccattcagtgccctctgctgacaaaacttagtgcccactggcagaggagagctatttgcatgtttcagctccattttcacagagcagtgaaggatgggtttggagttgataggcaatgaattgaaatctggcatataagcttaatactttgatataaatactagctttatacttttttgtaggctcttgaactagacccatcaaataccaaagcattgtaccgcagagctcaaggatggcaaggattaaaagaatatgatcaagcattggtaaattttgttccaaatgtttaattttttaaaatagacaactacctttataaatcatacacctaacttaaatgtttttttccaattaaaggctgatcttaagaaagctcaggggatagcaccagaagataaaggtaagttggcagcttttgtagtgaaagttaattttgttatttaaatacttatcctcaggaaccattgttcactttgccagattttagatgtttgttcaacagacactacagaatgcctgctgttgggccaggcattatcatatagaatgaacaagacagtcaaagtccctgccctcaaagagcttacattctactcccattcaagaatatagtagtttttcacgttatttattcttcaagttatcatctctgtagttttttatatgtctaaatactgtttgtcttatggtatcctttgagactgtgttcctattctggttagtctagtcgagagctcagcattgtaagacacagtattcatggtaaatttaacatttgggaccattcaagttgaatgtggctataaccttagtattgatgtactggttatatgttttaggaaactatgacaaaaataagcttgtttttcaaataaaccaactatgaatagtgacactagatctgggtattacaaaatgtctttggtctcttattactaaaatgaaacaagggaagcaattactgttctctaatgtagaggcagaaggcaaatcttgatgtacttgagttctctcagttgacatcctctaaaattacgtttcatttctgtgtttgtgtgattgctcagattttctgttactagggcttagttactttgtagagaagttttttcaaggggtagttaacattaaaatagtttgttagtcaccataatttttggatattttgagaaataactcacattgcatatttattttacagctatccaggcagaattgctgaaagtcaaacaaaagataaaggcacagaaagataaagagaaggcagtatatgcaaaaatgtttgcttagaaaggattcagttttgcttattgtgtgttgattgtataaatgcaataagaaaatgtaaaggtttttgtctatgaatatgatccctaatgtgtttcttttgacaccttagttccttactgtttacagtttaggagtactgataggggttcatgcttaataaacatgtcacaatacagtaagtaaagtggttttgtttgtttctttgagatggagtcttgctctgtcacccaggctggagtgcggtggcgcaatctcggctcactgcatcctctgcctcccgggttcaagcaattctcctgcctcagcttcccaagtagctgggattacaggcacgtgccaccacgcccagctaatttttgtatttttagtagagatggggtttcaccatattggtcacgtcacgttggtcttgaactcctgaccttgtgatccaccccgccttggcctcccaaagtgctgggattacaggtgtgagccaccgtgcccggccaagtaaaatgttttttaaaatggttatgtgcattattcataaaaaataatggtgtccagtctttttaaacttgtaaagacacatcttattgaataaagagatgagagcttaagtttgtatattgtttccttcgattctttgatgtatccatggtggatgatgctaggttttcatacttatagataatacacacacacacacacacacaatcttgttcagggatgggcatacttcttctgcaagggccagatcataaagtttttaggctttgtagaccatgtaatgtcacacccactcacctgcacagttgtaattcaaaattagccatagacaatgtgtaaccaatgggtattgctgtgtttcaataaaactttagtctagaatatatattcatttttatatttgattacttaactttggcaagtcaaatgtaaagtccagtagtgaattttgctcttggtactgaatctctgaagaactgaagaggtaggaagatgctgcattcttataaaggttatttaaaagcaatacccgtaatttctttatgggacaatcttacatatagtataaaatttttatttgataatcattttgtgactattctgttcagtaatatgcagaaagacattctgaaatctgttaatctctaaacattttaacgttagcttgccatacttgaaagaaactggctagctgcagtttacattccattgtaagcaggtcctcctccaccttcaggtaccacccagttaatattctgacttggatctttaatatcacatgttttacaatgtacacagttctgagcatttatctgtaaccgaaatccatcaccttgttccacaggtacaaattcataaactcctgaaaagtaaaaataaataatattgaagtgcctaactttaaaaaatttttaaattcaaaagtaaaaattaaggaaagagtagccacagaaaccttaaaggttgctttctgaatgcttacccatagagattatgaagaccttggtgcattgctattgatgtgagtgtaaattacatgtacataataaaaggaggtacagcggtattcaactgagttgtctcactatcaagggtactcgacactgagtgtttgagttccacacaacctcgaagtcctcccttattcacagtcatcctctcattcacaggggacaagttccaaga

SEQ ID NO: 13 - protein, 298 aa, Homo sapiens
  Zn-alpha 2-glycoprotein (1)..(298): NM001185.1
MVRMVPVLLSLLLLLGPAVPQENQDGRYSLTYIYTGLSKHVEDVPAFQALGSLNDLQFFRYNSKDRKSQPMGLWRQVEGMEDWKQDSQLQKAREDIFMETLKDIVEYYNDSNGSHVLQGRFGCEIENNRSSGAFWKYYYDGKDYIEFNKEIPAWVPFDPAAQITKQKWEAEPVYVQRAKAYLEEECPATLRKYLKYSKNILDRQDPPSVVVTSHQAPGEKKKLKCLAYDFYPGKIDVHWTRAGEVQEPELRGDVLHNGNGTYQSWVVVAVPPQDTAPYSCHVQHSSLAQPLVVPWEAS

SEQ ID NO: 14 - protein, 1242 aa, Homo sapiens
  insulin receptor substrate 1 (IRS1) (1)..(1242): NM_005544.1
MASPPESDGFSDVRKVGYLRKPKSMHKRFFVLRAASEAGGPARLEYYENEKKWRHKSSAPKRSIPLESCFNINKRADSKNKHLVALYTRDEHFAIAADSEAEQDSWYQALLQLHNRAKGHHDGAAALGAGGGGGSCSGSSGLGEAGEDLSYGDVPPGPAFKEVWQVILKPKGLGQTKNLIGIYRLCLTSKTISFVKLNSEAAAVVLQLMNIRRCGHSENFFFIEVGRSAVTGPGEFWMQVDDSVVAQNMHETILEAMRAMSDEFRPRSKSQSSSNCSNPISVPLRRHHLNNPPPSQVGLTRRSRTESITATSPASMVGGKPGSFRVRASSDGEGTMSRPASVDGSPVSPSTNRTHAHRHRGSARLHPPLNHSRSIPMPASRCSPSATSPVSLSSSSTSGHGSTSDCLFPRRSSASVSGSPSDGGFISSDEYGSSPCDFRSSFRSVTPDSLGHTPPARGEEELSNYICMGGKGPSTLTAPNGHYILSRGGNGHRCTPGTGLGTSPALAGDEAASAADLDNRFRKRTHSAGTSPTITHQKTPSQSSVASIEEYTEMMPAYPPGGGSGGRLPGHRHSAFVPTRSYPEEGLEMHPLERRGGHHRPDSSTLHTDDGYMPMSPGVAPVPSGRKGSGDYMPMSPKSVSAPQQIINPIRRHPQRVDPNGYMMMSPSGGCSPDIGGGPSSSSSSSNAVPSGTSYGKLWTNGVGGHHSHVLPHPKPPVESSGGKLLPCTGDYMNMSPVGDSNTSSPSDCYYGPEDPQHKPVLSYYSLPRSFKHTQRPGEPEEGARHQHLRLSTSSGRLLYAATADDSSSSTSSDSLGGGYCGARLEPSLPHPHHQVLQPHLPRKVDTAAQTNSRLARPTRLSLGDPKASTLPRAREQQQQQQPLLHPPEPKSPGEYVNIEFGSDQSGYLSGPVAFHSSPSVRCPSQLQPAPREEETGTEEYMKMDLGPGRRAAWQESTGVEMGRLGPAPPGAASICRPTRAVPSSRGDYMTMQMSCPRQSYVDTSPAAPVSYADMRTGIAAEEVSLPRATMAAASSSSAASASPTGPQGAAELAAHSSLLGGPQGPGGMSAFTRVNLSPNRNQSAKVIRADPQGCRRRHSSETFSSTPSATRVGNTVPFGAGAAVGGGGGSSSSSEDVKRHSSASFENVWLRPGELGGAPKEPAKLCGAAGGLENGLNYIDLDLVKDFKQCPQECTPEPQPPPPPPPHQPLGSGESSSTRRSSEDLSAYASISFQKQPEDRQ

SEQ ID NO: 15 - protein, 267 aa, Homo sapiens
  apolipoprotein A-I (1)..(267): M27875.1
MKAAVLTLAVLFLTGSQARHFWQQDEPPQSPWDRVKDLATVYVDVLKDSGRDYVSQFEGSALGKQLNLKLLDNWDSVTSTFSKLREQLGPVTQEFWDNLEKETEGLRQEMSKDLEEVKAKVQPYLDDFQKKWQEEMELYRQKVEPLRAELQEGARQKLHELQEKLSPLGEEMRDRARAHVDALRTHLAPYSDELRQRLAARLEALKENGGARLAEYHAKATEHLSTLSEKAKPALEDLRQGLLPVLESFKVSFLSALEEYTKKLNTQ

SEQ ID NO: 16 - protein, 789 aa, Homo sapiens
  aryl hydrocarbon receptor nuclear translocator (ARNT) (1)..(789): M69238.1
MAATTANPEMTSDVPSLGPAIASGNSGPGIQGGGAIVQRAIKRRPGLDFDDDGEGNSKFLRCDDDQMSNDKERFARSDDEQSSADKERLARENHSEIERRRRNKMTAYITELSDMVPTCSALARKPDKLTILRMAVSHMKSLRGTGNTSTDGSYKPSFLTDQELKHLILEAADGFLFIVSCETGRVVYVSDSVTPVLNQPQSEWFGSTLYDQVHPDDVDKLREQLSTSENALTGRILDLKTGTVKKEGQQSSMRMCMGSRRSFICRMRCGSSSVDPVSVNRLSFVRNRCRNGLGSVKDGEPHFVVVHCTGYIKAWPPAGVSLPDDDPEAGQGSKFCLVAIGRLQVTSSPNCTDMSNVCQPTEFISRHNIEGIFTFVDHRCVATVGYQPQELLGKNIVEFCHPEDQQLLRDSFQQVVKLKGQVLSVMFRFRSKNQEWLWMRTSSFTFQNPYSDEIEYIICTNTNVKNSSQEPRPTLSNTIQRPQLGPTANLPLEMGSGQLAPRQQQQQTELDMVPGRDGLASYNHSQVVQPVTTTGPEHSKPLEKSDGLFAQDRDPRFSEIYHNINADQSKGISSSTVPATQQLFSQGNTFPPTPRPAENFRNSGLAPPVTIVQPSASAGQMLAQISRHSNPTQGATPTWTPTTRSGFSAQQVATQATAKTRTSQFGVGSFQTPSSFSSMSLPGAPTASPGAAAYPSLTNRGSNFAPETGQTAGQFQTRTAEGVGVWPQWQGQQPHHRSSSSEQHVQQPPAQQPGQPEVFQEMLSMLGDQSNSYNNEEFPDLTMFPPFSE

SEQ ID NO: 17 - protein, 381 aa, Homo sapiens
  creatine kinase, brain (CKB) (1)..(381): NM_001823.3
MPFSNSHNALKLRFPAEDEFPDLSAHNNHMAKVLTPELYAELRAKSTPSGFTLDDVIQTGVDNPGHPYIMTVGCVAGDEESYEVFKDLFDPIIEDRHGGYKPSDEHKTDLNPDNLQGGDDLDPNYVLSSRVRTGRSIRGFCLPPHCSRGERRAIEKLAVEALSSLDGDLAGRYYALKSMTEAEQQQLIDDHFLFDKPVSPLLLASGMARDWPDARGIWHNDNKTFLVWVNEEDHLRVISMQKGGNMKEVFTRFCTGLTQIETLFKSKDYEFMWNPHLGYILTCPSNLGTGLRAGVHIKLPNLGKHEKFSEVLKRLRLQKRGTGGVDTAAVGGVFDVSNADRLGFSEVELVQMVVDGVKLLIEMEQRLEQGQAIDDLMPAQK

SEQ ID NO: 18 - protein, 299 aa, Homo sapiens
  delta7-sterol-C5-desaturase (S5DES) (1)..(299): AF187981.1
MDLVLRVADYYFFTPYVYPATWPEDDIFRQAISLLIVTNVGAYILYFFCATLSYYFVFDHALMKHPQFLKNQVRREIKFTVQALPWISILTVALFLLEIRGYSKLHDDLGEFPYGLFELVVSIISFLFFTDMFIYWIHRGLHHRLVYKRLHKPHHIWKIPTPFASHAFHPIDGFLQSLPYHIYPFIFPLHKVVYLSLYILVNIWTISIHDGDFRVPQILQPFINGSAHHTDHHMFFDYNYGQYFTLWDRIGGSFKNPSSFEGKGPLSYVKEMTEGKRSSHSGNGCKNEKLFNGEFTKTE

SEQ ID NO: 19 - protein, 421 aa, Homo sapiens
  osteomodulin (OMD) (1)..(421): NM_005014.1
MGFLSPIYVIFFFFGVKVHCQYETYQWDEDYDQEPDDDYQTGFPFRQNVDYGVPFHQYTLGCVSECFCPTNFPSSMYCDNRKLKTIPNIPMHIQQLYLQFNEIEAVTANSFINATHLKEINLSHNKIKSQKIDYGVFAKLPNLLQLHLEHNNLEEFPFPLPKSLERLLLGYNEISKLQTNAMDGLVNLTMLDLCYNYLHDSLLKDKIFAKMEKLMQLNLCSNRLESMPPGLPSSLMYLSLENNSISSIPEKYFDKLPKLHTLRMSHNKLQDIPYNIFNLPNIVELSVGHNKLKQAFYIPRNLEHLYLQNNEIEKMNLTVMCPSIDPLHYHHLTYIRVDQNKLKEPISSYIFFCFPHIHTIYYGEQRSTNGQTIQLKTQVFRRFPDDDDESEDHDDPDNAHESPEQEGAEGHFDLHYYENQE

SEQ ID NO: 20 - protein, 845 aa, Homo sapiens
  very low density lipoprotein receptor (1)..(845): D16494.1
MGTSALWALWLLLALCWAPRESGATGTGRKAKCEPSQFQCTNGRCITLLWKCDGDEDCVDGSDEKNCVKKTCAESDFVCNNGQCVPSRWKCDGDPDCEDGSDESPEQCHMRTCRIHEISCGAHSTQCIPVSWRCDGENDCDSGEDEENCGNITCSPDEFTCSSGRCISRNFVCNGQDDCSDGSDELDCAPPTCGAHEFQCSTSSCIPISWVCDDDADCSDQSDESLEQCGRQPVIHTKCPASEIQCGSGECIHKKWRCDGDPDCKDGSDEVNCPSRTCRPDQFECEDGSCIHGSRQCNGIRDCVDGSDEVNCKNVNQCLGPGKFKCRSGECIDISKVCNQEQDCRDWSDEPLKECHINECLVNNGGCSHICKDLVIGYECDCAAGFELIDRKTCGDIDECQNPGICSQICINLKGGYKCECSRGYQMDLATGVCKAVGKEPSLIFTNRRDIRKIGLERKEYIQLVEQLRNTVALDADIAAQKLFWADLSQKAIFSASIDDKVGRHVKMIDNVYNPAAIAVDWVYKTIYWTDAASKTISVATLDGTKRKFLFNSDLREPASIAVDPLSGFVYWSDWGEPAKIEKAGMNGFDRRPLVTADIQWPNGITLDLIKSRLYWLDSKLHMLSSVDLNGQDRRIVLKSLEFLAHPLALTIFEDRVYWIDGENEAVYGANKFTGSELATLVNNLNDAQDIIVYHELVQPSGKNWCEEDMENGGCEYLCLPAPQINDHSPKYTCSCPSGYNVEENGRDCQRINVTTAVSEVSVPPKGTSAAWAILPLLLLVMAAVGGYLMWRNWQHKNMKSMNFDNPVYLKTTEEDLSIDIGRHSASVGHTYPAISVVSTDDDLA

SEQ ID NO: 21 - protein, 297 aa, Homo sapiens
  hydroxysteroid (11-beta) dehydrogenase 1 (HSD11B1) (1)..(297): NM_005525.2
MAFMKKYLLPILGLFMAYYYYSANEEFRPEMLQGKKVIVTGASKGIGREMAYHLAKMGAHVVVTARSKETLQKVVSHCLELGAASAHYIAGTMEDMTFAEQFVAQAGKLMGGLDMLILNHITNTSLNLFHDDIHHVRKSMEVNFLSYVVLTVAALPMLKQSNGSIVVVSSLAGKVAYPMVAAYSASKFALDGFFSSIRKEYSVSRVNVSITLCVLGLIDTETAMKAVSGIVHMQAAPKEECALEIIKGGALRQEEVYYDSSLWTTLLIRNPCRKILEFLYSTSYNMDRFINKDDDLA

SEQ ID NO: 22 - protein, 3460 aa, Homo sapiens [sequence omitted]

SEQ ID NO: 23 - protein, 700 aa, Homo sapiens
  atp-binding cassette, sub-family c (cftr/mrp), member 10 (ABCC10)atp-binding (1)..(700): AL133613.1
AVLLMEAGRLIRAGPPSEILPLVQAVPKAWAENGQESDSATAQSVQNPEKTKEGLEEEQSTSGRLLQEESKKEGAVALHVYQAYWKAVGQGLALAILFSLLLMQATRNAADWWLSHWISQLKAENSSQEAQPSTSPASMGLFSPQLLLFSPGNLYIPVFPLPKAAPNGSSDIRFYLTVYATIAGVNSLCTLLRAVLFAAGTLQAAATLHRRLLHRVLMAPVTFFNATPTGRILNRFSSDVACADDSLPFILNILLANAAGLLGLLAVLGSGLPWLLLLLPPLSIMYYHVQRHYRASSRELRRLGSLTLSPLYSHLADTLAGLSVLRATGATYRFEEENLRLLELNQRCQFATSATMQWLDIRLQLMGAAVVSAIAGIALVQHQQGLANPGLVGLSLSYALSLTGLLSGLVSSFTQTEAMLVSVERLEEYTCDLPQEPQGQPLQLGTGWLTQGGVEFQDVVLAYRPGLPNALDGVTFCVQPGEKLGIVGRTGSGKSSLLLVLFRLLEPSSGRVLLDGVDTSQLELAQLRSQLAIIPQEPFLFSGTVRENLDPQGLHKDRALWQALKQCHLSEVITSMGGLDGELGEGGRSLSLGQRQLLCLARALLTDAKILCIDEATASVDQKTDQLLQQTICKRFANKTVLTIAHRLNTILNSDRVLVLQAGRVVELDSPATLRNQPHSLFQQLLQSSQQGVPASLGGP

SEQ ID NO: 24 - protein, 370 aa, Homo sapiens
  cyclophilin 40 (1)..(370): D63861.1
MSHPSPQAKPSNPSNPRVFFDVDIGGERVGRIVLELFADIVPKTAENFRALCTGEKGIGHTTGKPLHFKGCPFHRIIKKFMIQGGDFSNQNGTGGESIYGEKFEDENFHYKHDREGLLSMANAGRNTNGSQFFITTVPTPHLDGKHVVFGQVIKGIGVARILENVEVKGEKPAKLCVIAECGELKEGDDGGIFPKDGSGDSHPDFPEDADIDLKDVDKILLITEDLKNIGNTFFKSQNWEMAIKKYAEVLRYVDSSKAVIETADRAKLQPIALSCVLNIGACKLKMSNWQGAIDSCLEALELDPSNTKALYRRAQGWQGLKEYDQALADLKKAQGIAPEDKAIQAELLKVKQKIKAQKDKEKAVYAKMFA

SEQ ID NO: 25 - DNA, 1730 bp, Homo sapiens
  retinoid X receptor, gamma (1)..(1730): LocusID: 6258;  NM_006917
ctccgatctagaggcagattcctgactaatcccagagggctggcccagcctgtgctccccgggctgctaggaagcgatgaccactcttgttagcccaagttgaagaaagccgggctgtgcctgggagccgagagaggcggtaatatttagaagctgcacaggagaggaacatgaactgacgagtaaacatgtatggaaattattctcacttcatgaagtttcccgcaggctatggaggctcccctggccacactggctctacatccatgagcccatcagcagccttgtccacagggaagccaatggacagccaccccagctacacagataccccagtgagtgccccacggactctgagtgcagtggggacccccctcaatgccctgggctctccatatcgagtcatcacctctgccatgggcccaccctcaggagcacttgcagcgcctccaggaatcaacttggttgccccacccagctctcagctaaatgtggtcaacagtgtcagcagttcagaggacatcaagcccttaccagggcttcccgggattggaaacatgaactacccatccaccagccccggatctctggttaaacacatctgtgccatctgtggagacagatcctcaggaaagcactacggggtatacagttgtgaaggctgcaaagggttcttcaagaggacgataaggaaggacctcatctacacgtgtcgggataataaagactgcctcattgacaagcgtcagcgcaaccgctgccagtactgtcgctatcagaagtgccttgtcatgggcatgaagagggaagctgtgcaagaagaaagacagaggagccgagagcgagctgagagtgaggcagaatgtgctaccagtggtcatgaagacatgcctgtggagaggattctagaagctgaacttgctgttgaaccaaagacagaatcctatggtgacatgaatatggagaactcgacaaatgaccctgttaccaacatatgtcatgctgctgacaagcagcttttcaccctcgttgaatgggccaagcgtattccccacttctctgacctcaccttggaggaccaggtcattttgcttcgggcagggtggaatgaattgctgattgcctctttctcccaccgctcagtttccgtgcaggatggcatccttctggccacgggtttacatgtccaccggagcagtgcccacagtgctggggtcggctccatctttgacagagtcctaactgagctggtttccaaaatgaaagacatgcagatggacaagtcggaactgggatgcctgcgagccattgtactctttaacccagatgccaagggcctgtccaacccctctgaggtggagactctgcgagagaaggtttatgccacccttgaggcctacaccaagcagaagtatccggaacagccaggcaggtttgccaagctgctgctgcgcctcccagctctgcgttccattggcttgaaatgcctggagcacctcttcttcttcaagctcatcggggacacccccattgacaccttcctcatggagatgttggagaccccgctgcagatcacctgagccccaccagccacagcctccccacccaggatgacccctgggcaggtgtgtgtggacccccaccctgcactttcctccacctcccaccctgacccccttcctgtccccaaaatgtgatgcttataataaagaaaacctttctacaaaaaa

SEQ ID NO: 26 - DNA, 1723 bp, Homo sapiens
  vascular endothelial growth factor (1)..(1723): Locus ID: 7422; NM_003376
tcgcggaggcttggggcagccgggtagctcggaggtcgtggcgctgggggctagcaccagcgctctgtcgggaggcgcagcggttaggtggaccggtcagcggactcaccggccagggcgctcggtgctggaatttgatattcattgatccgggttttatccctcttcttttttcttaaacatttttttttaaaactgtattgtttctcgttttaatttatttttgcttgccattccccacttgaatcgggccgacggcttggggagattgctctacttccccaaatcactgtggattttggaaaccagcagaaagaggaaagaggtagcaagagctccagagagaagtcgaggaagagagagacggggtcagagagagcgcgcgggcgtgcgagcagcgaaagcgacaggggcaaagtgagtgacctgcttttgggggtgaccgccggagcgcggcgtgagccctcccccttgggatcccgcagctgaccagtcgcgctgacggacagacagacagacaccgcccccagccccagctaccacctcctccccggccggcggcggacagtggacgcggcggcgagccgcgggcaggggccggagcccgcgcccggaggcggggtggagggggtcggggctcgcggcgtcgcactgaaacttttcgtccaacttctgggctgttctcgcttcggaggagccgtggtccgcgcgggggaagccgagccgagcggagccgcgagaagtgctagctcgggccgggaggagccgcagccggaggagggggaggaggaagaagagaaggaagaggagagggggccgcagtggcgactcggcgctcggaagccgggctcatggacgggtgaggcggcggtgtgcgcagacagtgctccagccgcgcgcgctccccaggccctggcccgggcctcgggccggggaggaagagtagctcgccgaggcgccgaggagagcgggccgccccacagcccgagccggagagggagcgcgagccgcgccggccccggtcgggcctccgaaaccatgaactttctgctgtcttgggtgcattggagccttgccttgctgctctacctccaccatgccaagtggtcccaggctgcacccatggcagaaggaggagggcagaatcatcacgaagtggtgaagttcatggatgtctatcagcgcagctactgccatccaatcgagaccctggtggacatcttccaggagtaccctgatgagatcgagtacatcttcaagccatcctgtgtgcccctgatgcgatgcgggggctgctgcaatgacgagggcctggagtgtgtgcccactgaggagtccaacatcaccatgcagattatgcggatcaaacctcaccaaggccagcacataggagagatgagcttcctacagcacaacaaatgtgaatgcagaccaaagaaagatagagcaagacaagaaaaaaaatcagttcgaggaaagggaaaggggcaaaaacgaaagcgcaagaaatcccggtataagtcctggagcgttccctgtgggccttgctcagagcggagaaagcatttgtttgtacaagatccgcagacgtgtaaatgttcctgcaaaaacacagactcgcgttgcaaggcgaggcagcttgagttaaacgaacgtacttgcagatgtgacaagccgaggcggtgagccgggcaggaggaaggagcctccctcagggtttcgg

SEQ ID NO: 27 - DNA, 5480 bp, Homo sapiens
  cannabinoid receptor 1 (brain) variant 1 (1)..(5480): LocusID: 1268; NM_016083
gattgccccctgtgggtcactttctcagtcattttgagctcagcctaatcaaagactgaggttatgaagtcgatcctagatggccttgcagataccaccttccgcaccatcaccactgacctcctgtacgtgggctcaaatgacattcagtacgaagacatcaaaggtgacatggcatccaaattagggtacttcccacagaaattccctttaacttcctttaggggaagtcccttccaagagaagatgactgcgggagacaacccccagctagtcccagcagaccaggtgaacattacagaattttacaacaagtctctctcgtccttcaaggagaatgaggagaacatccagtgtggggagaacttcatggacatagagtgtttcatggtcctgaaccccagccagcagctggccattgcagtcctgtccctcacgctgggcaccttcacggtcctggagaacctcctggtgctgtgcgtcatcctccactcccgcagcctccgctgcaggccttcctaccacttcatcggcagcctggcggtggcagacctcctggggagtgtcatttttgtctacagcttcattgacttccacgtgttccaccgcaaagatagccgcaacgtgtttctgttcaaactgggtggggtcacggcctccttcactgcctccgtgggcagcctgttcctcacagccatcgacaggtacatatccattcacaggcccctggcctataagaggattgtcaccaggcccaaggccgtggtggcgttttgcctgatgtggaccatagccattgtgatcgccgtgctgcctctcctgggctggaactgcgagaaactgcaatctgtttgctcagacattttcccacacattgatgaaacctacctgatgttctggatcggggtcaccagcgtactgcttctgttcatcgtgtatgcgtacatgtatattctctggaaggctcacagccacgccgtccgcatgattcagcgtggcacccagaagagcatcatcatccacacgtctgaggatgggaaggtacaggtgacccggccagaccaagcccgcatggacattaggttagccaagaccctggtcctgatcctggtggtgttgatcatctgctggggccctctgcttgcaatcatggtgtatgatgtctttgggaagatgaacaagctcattaagacggtgtttgcattctgcagtatgctctgcctgctgaactccaccgtgaaccccatcatctatgctctgaggagtaaggacctgcgacacgctttccggagcatgtttccctcttgtgaaggcactgcgcagcctctggataacagcatgggggactcggactgcctgcacaaacacgcaaacaatgcagccagtgttcacagggccgcagaaagctgcatcaagagcacggtcaagattgccaaggtaaccatgtctgtgtccacagacacgtctgccgaggctctgtgagcctgatgcctccctggcagcacaggaaaagaatttttttttttaagctcaaaatctagaagagtctattgtctccttggttatatttttttaactttaccatgctcaatgaaaaggtgattgtcaccatgatcacttatcagtttgctaatgtttccatagtttaggtactcaaactccattctccaggggtttacagtgaagaaagcctgttgtttaagtgactgaacgatccttcaaagtctcaatgaaataggagggaaacctttggctacacaattggaagtctaagaacccatggaaaaatgccatcaaatgaataatgcctttgtaaccacaactttcactataatgtgaaatgtaactgtccgtagtatcagagatgtccatttttacaagttatagtactagagatattttgtaaaatgtattatgtcctgtgagatgtgtatcagtgtttatgtgctattaatatttgtttagttcagcaaaactgaaaggtagacttttatgagaacaatggacaagcagtggatacgtgtcaatgtgtgcactttttttctatattattgcccatgatataactttagaaataaaccttaatatttcttcaaatatctctatttaattttgacactgaaataaccgtaaaggtttatttttctgttacctcaacaagaagaatttgaagacttcaaaatattgagcagaattcattcatacttaaaaatttattagccctgcattttcataggaagacacattatcttctggactatagctgttctaatggattataatcagaatggaagagagaaagcatattgactttttttgagcgacatctctgactttctttagtctttagctattactggatctcttaagacagcatgtgttaatcttaatgtatatcgttatcactgtgcagttgctgtttacttgaatagtattgtgttcctatattccaggtttaagtagatttcatgcctgggtggccaaacaacagtcttcattttttttaattgaaaagaagtagtgtctggatcagtaaaattatactgtgtgtgagtgtgaatataaatgtgtgtatgtgtgtttctgtcctgtaactgttacagtaatgtcataaagtgagaaaactgtgaccaagtataaacttttaccacttgctgcactcttgcacatggattcagtttctaaaattgagttcttcctgtaatcttgttgataaaaatactgactccaaccattcaaaaatttcaccccatccctccttaagagattggatcaagtattactaaattgacctttaggtattacacaagaccagtgcttagcaaaaaataatgacaggcatccaaggaagggatgtatttgtagtgttattgccaggaaaggagagtactttggtttctgagcaccgaatattgagcaatatgtcagtcactaaaaggaagacagttctacagaaaaacaatggtaacatttttcaatagcgtgtgtagatagtatgcactatatacatcacgttaaagtaggactatcacacccagcccatgtggctaaaaaagctgaatcagacagtggatgagacacacaacggcagtgaagaaccgatacacttggcattgacgtctagctatgctgtatctgtgctttgcccacatgcccttggtgacagctgagcacccagctctgtcttggtaggtttgggctaaggaacaaatctctcctttgctcgtggttagcaagatacactcaagcatgaagataaacacagctgctttcttcttacaccccggtctcatgctccttaatggcgccatgggtgcttgttgggcctttttccagtaaggaatgatattgctgaagaatctacttaaccctgacaaattttaattataatctcttcttatacagataaaacatgactcctacaaggccccaaggtttacatagtctgaagtgaagtacagagctggcatctatctggtgatttctagctctcgagatacccaagcagcctgatggggcagttccccttcttacggttcacgctctaaggcaggatgtggcttatgagatactttgcattgtctgtctgcacaccttgaatctgcctgctggctcccttactttacctctctgtcatgtgcagatgaaggctcagggtgctagaggattagtaagatctctttctaaagacaggagagattatttacaagaagaactcaccagggtttagtttgcatttaagaattgccagtcttttgtcctgcatcatcttgaacattaatccacatgtttcagagctcaccaggcagtaccaatgctcttttcacagctatgaagagctagagaaattcttgttatggtagaaaaatttcacgattcatttttgaaactgcatttgtgcgtatgcagtgtagattttatagtgtgttgtgctttcaagatctaaatcatatataataaattaagggacaatggggctgacagcactaaacttggtgcttattgatattctaagaaatatctgtgaaatatcatcacgtatgttatacaaccttcatttaaaaaggtttaaaactagttagattcactttgacacttttcatatcatttcttaacccaagtgacgaaaacattgtccccaatgaatatactcattagaattaccatttgttaatatcactcattaattaaccccataattagatccattaatttaaatgatttaaatttaagtaagttttataaggtctgacatcagaggtatcttactttcctctgaggatgatgtacttgccctgaccatgcattttaccatcacacatgttcagaaagggccaaattcccaacctgctcattttttttttatcagagtcatgatgaatcagtcctagaatgtttcatttgcacaagtagggctgcctccaagaggaacctctgatttattttgtatgaaatatatgtgaaaggatatgaatctgagagatgctgtagacatctgtcctacacttgagatgatttccaagcctctctggcactttgagttaagtctatctggtattaaatgccaaggaccttttgctgcctaaatccactctgcaggaaataggcccaaccaccagatgagaattaggccctggatgagtagcgctatagttactgtcctgttgattaatttctgccatttcatgtccataaaagagaccacccatatcatgcacacaattagatttctcacactctaactgtatatttgtatgatattttaaaatctcctaaatgctgggcaatggctattaacaattaattgtcttgcactggccttctgatgaaatgttaacaatgcctattgtaatatagaaaaaaacattctatctactgatttgggctgaatgtatgtaaataggtttctaaaaagtcagatgtttgagcagtggcctacaaatcagtaattttcggatgggagagtttctttacattgccgtggcatcttaaaagctatcttcatgtaaattgactgtactaggcctactggggatcagagttcccaagaaaggaaaccttttcttgtatctggattcaaatttatttccaatgtttcaagcgggaaacatgactctttattgtctgtaaatctaacattattacttttcctcttagaagaatattgtattgttagatgtttgttgagctggtaacatcgttgcaaccactgcaatatcttcgttagtaatctgtataatactttgtatacaagtactggtaagattgttattaaatgtagcttcagtcattaaattactatagcaaagtagtacttcttctgtaatatttacaatgtattaagcccacagtatattttatttcaatgtaattaaactgttaacttattcaaagagaaaacatctcatcatgtctattgtccaaagttacctggaatcaaataaaaattctagattaccatgaagaacataaaaaaaaaa

SEQ ID NO: 28 - DNA, 1252 bp, Homo sapiens
  cannabinoid receptor 1 (brain) variant 2 (1)..(1252): LocusID: 1268; NM_033181
atgaagtcgatcctagatggccttgcagataccaccttccgcaccatcaccactgacctcctgtacgtgggctcaaatgacattcagtacgaagacatcaaaggagaatgaggagaacatccagtgtggggagaacttcatggacatagagtgtttcatggtcctgaaccccagccagcagctggccattgcagtcctgtccctcacgctgggcaccttcacggtcctggagaacctcctggtgctgtgcgtcatcctccactcccgcagcctccgctgcaggccttcctaccacttcatcggcagcctggcggtggcagacctcctggggagtgtcatttttgtctacagcttcattgacttccacgtgttccaccgcaaagatagccgcaacgtgtttctgttcaaactgggtggggtcacggcctccttcactgcctccgtgggcagcctgttcctcacagccatcgacaggtacatatccattcacaggcccctggcctataagaggattgtcaccaggcccaaggccgtggtggcgttttgcctgatgtggaccatagccattgtgatcgccgtgctgcctctcctgggctggaactgcgagaaactgcaatctgtttgctcagacattttcccacacattgatgaaacctacctgatgttctggatcggggtcaccagcgtactgcttctgttcatcgtgtatgcgtacatgtatattctctggaaggctcacagccacgccgtccgcatgattcagcgtggcacccagaagagcatcatcatccacacgtctgaggatgggaaggtacaggtgacccggccagaccaagcccgcatggacattaggttagccaagaccctggtcctgatcctggtggtgttgatcatctgctggggccctctgcttgcaatcatggtgtatgatgtctttgggaagatgaacaagctcattaagacggtgtttgcattctgcagtatgctctgcctgctgaactccaccgtgaaccccatcatctatgctctgaggagtaaggacctgcgacacgctttccggagcatgtttccctcttgtgaaggcactgcgcagcctctggataacagcatgggggactcggactgcctgcacaaacacgcaaacaatgcagccagtgttcacagggccgcagaaagctgcatcaagagcacggtcaagattgccaaggtaaccatgtctgtgtccacagacacgtctgccgaggctctgtga

SEQ ID NO: 29 - DNA, 2930 bp, Homo sapiens
  cathepsin O (1)..(2930): LocusID: 1519; NM_001334
ccgaaagagaaaacaggccgcgcgggcggcagaggagccgggcgccgcaatggacgtgcgggcgctgccgtggctgccgtggctgctgtggctgctgtgccggggcggcggcgatgcggactcccgcgcccccttcaccccgacctggccgcggagccgcgagcgtgaagccgccgccttccgggaaagtcttaatagacatcgatacttgaattctttatttcccagtgaaaactccaccgccttctatggaataaatcagttttcctatttgtttcctgaagagtttaaagccatttatttaagaagcaaaccttccaagtttcccagatactcagcagaagtacatatgtccatccccaatgtgtctttgccgttaagatttgactggagggacaagcaggttgtgacacaagtgagaaaccagcagatgtgtggaggatgctgggccttcagcgtggtgggggcagtggaatctgcttatgcaataaaggggaagcccctggaagacctaagtgtccagcaggtcattgactgttcgtataataattatggctgcaatggaggctctactctcaatgctttgaactggttaaacaagatgcaagtaaaactggtgaaagattcagaatatccttttaaagcacaaaatggtctgtgccattacttttctggttcacattctggattttcaatcaaaggttattctgcatatgacttcagtgaccaagaagatgaaatggcaaaagcacttcttacctttggccctttggtagtcatagtagatgcagtgagctggcaagattatctgggaggcattatacagcatcactgctctagtggagaagcaaatcatgcagttctcataactgggtttgataaaacaggaagcactccatattggattgtgcggaattcctggggaagttcttggggagtagatggttatgcccatgtcaaaatgggaagtaatgtttgtggtattgcagattccgtttcttctatatttgtgtgacatgttgggcagatcaagagacagctacaaaaatgaaggttttcataatgcaatgtaacatagtacttcaaagtattattcaacttcaagtttcagcaactacctacaaaagattctaaggcctagtagtatttaaactaagtttcagaatgttcccttcttgtagagagatggacaaccaaagtcagtgggacaaactccagcacagaagcctgcgaggaagcctatggaatagtttcctgtcctgagacgaaattcagattaggagatattttaggcccctgcaactggggaaggctactgtttgtttttgtttgcttattatttatttgtttgtttattgtgagatatttcaggtgggatcaaagaggtcataagaatttattttcttttgtggggtgtaactactagctttagattacccctatacacaagaatggccaacctaaaattatgtgtgtcttgtacagttagttatattagcagccctctgagatggcgtatctatcggaaggatttcaaacaccaattgctttacctgaacaaatggtgcttaccctttgaacagcagagtgaccacgtagaaggaaggaaaagggcaaaatcgcttcagttaaactgaaattaaatgaacaataaggcaactatataagtaacttctagtagcattgcctgagagacaaattattgtttgataattttcattgtgaataggaatccaatagatcatattgcttactttgttctttttatactatagaataatattttgttctctagtatatcaaaataccaaaatattatctcatattttctccctctttctcttactctttaccaagttttcctggtggcttggcttccctgactaaagaattaagtctcatttttactttccatttctattttcttaccacttggttggctccctttgtctctgtacctttaccaacattaggatctcacctctttcttcctcccttaattcataagcaccactcctatcaaagtcccatctcttaaccctgggtatcaaacaaactgtgagttttccagaatctgtttcccagttttcccctcagctttcctggtctcccatccgaactgcttctttgtgcacctcttgttctttctcttggctcccagtcttgattcctgtgatcactcttgcatcactaattgcacaagtgatttcaggtgcaattctgattagcctgcgtccacacagtgatcgatgatcctatgtgcctagaaaggacactgtgtgctgctcatgacctgcaacaggaaaaaagccatttcttgttagcagtgtaagaaccttagagcaaaggagttgaccttctgattgaatataagcacaaccatattaaatgaatcaatacaagaaaattatttctgatactatgtatgtacatatttcttctctaaaatgtatcattcttttctaatgtatatgatctaacaaaaatgaaacatgaaatgcagtagcaaccactaaaaaaaaaaattcaaggacatctaactttttctctcacttttgccctttgtttatccttccctgtgattagataaacaaaataaaaaacaaaatgctgtatttctcttcttacgccagtcagaaccaatccgaaaagaatgtgtgttgactcaggtttggagttatttcaggaagacagatattgaccttttaattgataaatattcttattatcctggaatgccagaaaagaactatgtcctgcttgtctagtttgtattcgctgactttctatgtgatatagatgcatttgtaatactctttttcaagtgctaaaggatttctaaaatttcaaactgattaatatgtttctgctgttctggattttgatgacatttacaataaaacaacctacatttgactttggtttaaaaa

SEQ ID NO: 30 - DNA, 1326 bp, Homo sapiens
  enoyl Coenzyme A hydratase, short chain, 1 mitochondrial (1)..(1326): LocusID: 1892; NM_004092
gcggagcgagccctgaaaggctataggcgagggggcggctccgcggggccgggcgaggagtccagagagccatggccgccctgcgtgtcctgctgtcctgcgcccgcggcccgctgaggcccccggttcgctgtcccgcctggcgtcccttcgcctcgggtgctaactttgagtacatcatcgcagaaaaaagagggaagaataacaccgtggggttgatccaactgaaccgccccaaggccctcaatgcactttgcgatggcctgattgacgagctcaaccaggccctgaagatcttcgaggaggacccggccgtgggggccattgtcctcaccggcggggataaggcctttgcagctggagctgatatcaaggaaatgcagaacctgagtttccaggactgttactccagcaagttcttgaagcactgggaccacctcacccaggtcaagaagccagtcatcgctgctgtcaatggctatgcctttggcgggggctgtgagcttgccatgatgtgtgatatcatctatgccggtgagaaggcccagtttgcacagccggagatcttaataggaaccatcccaggtgcgggcggcacccagagactcacccgtgctgttgggaagtcgctggcgatggagatggtcctcaccggtgaccggatctcagcccaggacgccaagcaagcaggtcttgtcagcaagatttgtcctgttgagacactggtggaagaagccatccagtgtgcagaaaaaattgccagcaattctaaaattgtagtagcgatggccaaagaatcagtgaatgcagcttttgaaatgacattaacagaaggaagtaagttggagaagaaactcttttattcaacctttgccactgatgaccggaaagaagggatgaccgcgtttgtggaaaagagaaaggccaacttcaaagaccagtgagaaccagctgcccctgcttcacacctctgcttggagaggacaagtgcagcctgtcagttttagaagcaagtaaatcatcctcttttcaagagcagtgtccgtggtgtgcagttcctctccaattgctgcgtggtcgtggcccgacctctcacggcatgacagccttcgtcacccagcctgtgagggtcctgactggagcaccttctaaatctaagattctgctgaggagcccccgctggtccctctgggcatgctgtgctcggacggaaagcggggcctgcgggtccttgtgtccctgccgctgaagaatggggctgctctgagggaaacgctgtctgctgccttcatacagatgctgattaaagtgatagcgattcagatt

SEQ ID NO: 31 - DNA, 1120 bp, Homo sapiens
  vascular endothelial growth factor B (1)..(1120): LocusID: 7423; NM_003377
gcgatgcgggcgcccccggcgggcggccccggcgggcaccatgagccctctgctccgccgcctgctgctcgccgcactcctgcagctggcccccgcccaggcccctgtctcccagcctgatgcccctggccaccagaggaaagtggtgtcatggatagatgtgtatactcgcgctacctgccagccccgggaggtggtggtgcccttgactgtggagctcatgggcaccgtggccaaacagctggtgcccagctgcgtgactgtgcagcgctgtggtggctgctgccctgacgatggcctggagtgtgtgcccactgggcagcaccaagtccggatgcagatcctcatgatccggtacccgagcagtcagctgggggagatgtccctggaagaacacagccagtgtgaatgcagacctaaaaaaaaggacagtgctgtgaagccagacagggctgccactccccaccaccgtccccagccccgttctgttccgggctgggactctgcccccggagcaccctccccagctgacatcacccatcccactccagccccaggcccctctgcccacgctgcacccagcaccaccagcgccctgacccccggacctgccgctgccgctgccgacgccgcagcttcctccgttgccaagggcggggcttagagctcaacccagacacctgcaggtgccggaagctgcgaaggtgacacatggcttttcagactcagcagggtgacttgcctcagaggctatatcccagtgggggaacaaagaggagcctggtaaaaaacagccaagcccccaagacctcagcccaggcagaagctgctctaggacctgggcctctcagagggctcttctgccatcccttgtctccctgaggccatcatcaaacaggacagagttggaagaggagactgggaggcagcaagaggggtcacataccagctcaggggagaatggagtactgtctcagtttctaaccactctgtgcaagtaagcatcttacaactggctcttcctcccctcactaagaagacccaaacctctgcataatgggatttgggctttggtacaagaactgtgacccccaaccctgataaaagagatggaaggaaa

SEQ ID NO: 32 - DNA, 4111 bp, Homo sapiens
  pyruvate carboxylase transcript variant A (1)..(4111): Locus ID: 5091; NM_000920
gtttgccaaaggagtcgggcctgacggtggaagatgggaaatggccaaaagaataaaccatttcctcttacttaccgaatgaaaagcttgcttcatcttggcgttcaagactctctaatatgattccacctgttgggctctttcttccatttgcctccgcagatagtgtctgccttctggagagctgaccaaacactaaggatgctgaagttccgaacagtccatgggggcctgaggctcctgggaatccgccgaacctccaccgcccccgctgcctccccaaatgtccggcgcctggagtataagcccatcaagaaagtcatggtggccaacagaggtgagattgccatccgtgtgttccgggcctgcacggagctgggcatccgcaccgtagccatctactctgagcaggacacgggccagatgcaccggcagaaagcagatgaagcctatctcatcggccgcggcctggcccccgtgcaggcctacctgcacatcccagacatcatcaaggtggccaaggagaacaacgtagatgcagtgcaccctggctacgggttcctctctgagcgagcggacttcgcccaggcctgccaggatgcaggggtccggtttattgggccaagcccagaagtggtccgcaagatgggagacaaggtggaggcccgggccatcgccattgctgcgggtgttcccgttgtccctggcacagatgcccccatcacgtccctgcatgaggcccacgagttctccaacacctacggcttccccatcatcttcaaggcggcctatgggggtggagggcgtggcatgagggtggtgcacagctacgaggagctggaggagaattacacccgggcctactcagaggctctggccgcctttgggaatggggcgctgtttgtggagaagttcatcgagaagccacggcacatcgaggtgcagatcttgggggaccagtatgggaacatcctgcacctgtacgagcgagactgctccatccagcggcggcaccagaaggtggtcgagattgcccccgccgcccacctggacccgcagcttcggactcggctcaccagcgactctgtgaaactcgctaaacaggtgggctacgagaacgcaggcaccgtggagttcctggtggacaggcacggcaagcactacttcatcgaggtcaactcccgcctgcaggtggagcacacggtcacagaggagatcaccgacgtagacctggtccatgctcagatccacgtgtctgagggcaggagcctacccgacctgggcctgcggcaggagaacatccgcatcaacgggtgtgccatccagtgccgggtcaccaccgaggaccccgcgcgcagcttccagccggacaccggccgcattgaggtgttccggagcggagagggcatgggcatccgcctggataatgcttccgccttccaaggagccgtcatctcgccccactacgactccctgctggtcaaagtcattgcccacggcaaagaccaccccacggccgccaccaagatgagcagggcccttgcggagttccgcgtccgaggtgtgaagaccaacatcgccttcctgcagaatgtgctcaacaaccagcagttcctggcaggcactgtggacacccagttcatcgacgagaacccagagctgttccagctgcggcctgcacagaaccgggcccaaaagctgttgcactacctcggccatgtcatggtaaacggtccaaccaccccgattcccgtcaaggccagccccagccccacggaccccgttgtccctgcagtgcccataggcccgcccccggctggtttcagagacatcctgctgcgagaggggcctgagggctttgctcgagctgtgcggaaccacccggggctgctgctgatggacacgaccttcagggacgcccaccagtcactgctggccactcgtgtgcgcacccacgatctcaaaaagatcgccccctatgttgcccacaacttcagcaagctcttcagcatggagaactggggaggagccacgtttgacgtcgccatgcgcttcctgtatgagtgcccctggcggcggctgcaggagctccgggagctcatccccaacatccctttccagatgctgctgcggggggccaatgctgtgggctacaccaactacccagacaacgtggtcttcaagttctgtgaagtggccaaagagaatggcatggatgtcttccgtgtgtttgactccctcaactacttgcccaacatgctgctgggcatggaggcggcaggaagtgccggaggcgtggtggaggctgccatctcatacacgggcgacgtggccgaccccagccgcaccaagtactcactgcagtactacatgggcttggccgaagagctggtgcgagctggcacccacatcctgtgcatcaaggacatggccgggctgctgaagcccacggcctgcaccatgctggtcagctccctccgggaccggttccccgacctcccactgcacatccacacccacgacacgtcaggggcaggcgtggcagccatgctggcctgtgcccaggctggagctgatgtggtggatgtggcagctgattccatgtctgggatgacttcacagcccagcatgggggccctggtggcctgtaccagagggactcccctggacacagaggtgcccatggagcgcgtgtttgactacagtgagtactgggagggggctcggggactgtacgcggccttcgactgcacggccaccatgaagtctggcaactcggacgtgtatgaaaatgagatcccagggggccagtacaccaacctgcacttccaggcccacagcatggggcttggctccaagttcaaggaggtcaagaaggcctatgtggaggccaaccagatgctgggcgatctcatcaaggtgacgccctcctccaagatcgtgggggacctggcccagtttatggtgcagaatggattgagccgggcagaggccgaagctcaggcggaagagctgtcctttccccgctccgtggtggagttcctgcagggctacatcggtgtcccccatggggggttccccgaaccctttcgctctaaggtactgaaggacctgccaagggtggaggggcggcctggagcctccctccctcccctggatctgcaggcactggagaaggagctggtagaccggcatggggaggaggtgacgccggaagatgtgctctcagcagctatgtaccccgatgtgtttgcccacttcaaggacttcactgccacctttggccccctggatagcctgaatactcgcctcttcctgcagggacccaagatcgcagaggagtttgaggtggagctggagcggggcaagacgctgcacatcaaagccctggccgtgagcgacctgaaccgggccggccagaggcaggtcttctttgagctcaatgggcagctgcggtccatcttggtcaaggacacccaggccatgaaggagatgcacttccaccccaaggccctaaaggacgtgaagggccagatcggggcgcccatgcctgggaaggtgatagacatcaaagtggtggcaggggccaaggtggccaagggccagcccctgtgtgtgctcagtgccatgaagatggagactgtggtgacctcacccatggagggtactgtccgcaaggttcatgtgaccaaggacatgacactggaaggtgacgacctcatcctggagatcgagtgatcttgccccagaccggcagcctggccatccccaagccttcaacagaagctgtgctgccacggcaggcccaggccagccagtgcccgaggccaggaaggccgggccgtggaggtcctgtccacagctggacaggagagacaccgcctgcggtggttcattcctttcagccatcgtcctttcctccggcggacagctgcttacatgttcatctcttgccaaataagggtcccctcctcactggagactacaagtggtgggtcaggtggtcctaggacccaggggaggtttaggggtcctatctcctgggggaaggggagatctaagatgtcccaggtcctgggaagtttactcaataaagctggctttcccctgc

SEQ ID NO: 33 - DNA, 4041 bp, Homo sapiens
  pyruvate carboxylase transcript variant 2 (1)..(4041): LocusID: 5091; NM_022172
agttctggaaagtcattgacaggggattaacctagaacatcaattataaacaggcagcaggcctcaggcccagacttgggtgttacaggaacagtgtggcctctctggaactctgcagaccacctgccgtgatgctgaagttccgaacagtccatgggggcctgaggctcctgggaatccgccgaacctccaccgcccccgctgcctccccaaatgtccggcgcctggagtataagcccatcaagaaagtcatggtggccaacagaggtgagattgccatccgtgtgttccgggcctgcacggagctgggcatccgcaccgtagccatctactctgagcaggacacgggccagatgcaccggcagaaagcagatgaagcctatctcatcggccgcggcctggcccccgtgcaggcctacctgcacatcccagacatcatcaaggtggccaaggagaacaacgtagatgcagtgcaccctggctacgggttcctctctgagcgagcggacttcgcccaggcctgccaggatgcaggggtccggtttattgggccaagcccagaagtggtccgcaagatgggagacaaggtggaggcccgggccatcgccattgctgcgggtgttcccgttgtccctggcacagatgcccccatcacgtccctgcatgaggcccacgagttctccaacacctacggcttccccatcatcttcaaggcggcctatgggggtggagggcgtggcatgagggtggtgcacagctacgaggagctggaggagaattacacccgggcctactcagaggctctggccgcctttgggaatggggcgctgtttgtggagaagttcatcgagaagccacggcacatcgaggtgcagatcttgggggaccagtatgggaacatcctgcacctgtacgagcgagactgctccatccagcggcggcaccagaaggtggtcgagattgcccccgccgcccacctggacccgcagcttcggactcggctcaccagcgactctgtgaaactcgctaaacaggtgggctacgagaacgcaggcaccgtggagttcctggtggacaggcacggcaagcactacttcatcgaggtcaactcccgcctgcaggtggagcacacggtcacagaggagatcaccgacgtagacctggtccatgctcagatccacgtgtctgagggcaggagcctacccgacctgggcctgcggcaggagaacatccgcatcaacgggtgtgccatccagtgccgggtcaccaccgaggaccccgcgcgcagcttccagccggacaccggccgcattgaggtgttccggagcggagagggcatgggcatccgcctggataatgcttccgccttccaaggagccgtcatctcgccccactacgactccctgctggtcaaagtcattgcccacggcaaagaccaccccacggccgccaccaagatgagcagggcccttgcggagttccgcgtccgaggtgtgaagaccaacatcgccttcctgcagaatgtgctcaacaaccagcagttcctggcaggcactgtggacacccagttcatcgacgagaacccagagctgttccagctgcggcctgcacagaaccgggcccaaaagctgttgcactacctcggccatgtcatggtaaacggtccaaccaccccgattcccgtcaaggccagccccagccccacggaccccgttgtccctgcagtgcccataggcccgcccccggctggtttcagagacatcctgctgcgagaggggcctgagggctttgctcgagctgtgcggaaccacccggggctgctgctgatggacacgaccttcagggacgcccaccagtcactgctggccactcgtgtgcgcacccacgatctcaaaaagatcgccccctatgttgcccacaacttcagcaagctcttcagcatggagaactggggaggagccacgtttgacgtcgccatgcgcttcctgtatgagtgcccctggcggcggctgcaggagctccgggagctcatccccaacatccctttccagatgctgctgcggggggccaatgctgtgggctacaccaactacccagacaacgtggtcttcaagttctgtgaagtggccaaagagaatggcatggatgtcttccgtgtgtttgactccctcaactacttgcccaacatgctgctgggcatggaggcggcaggaagtgccggaggcgtggtggaggctgccatctcatacacgggcgacgtggccgaccccagccgcaccaagtactcactgcagtactacatgggcttggccgaagagctggtgcgagctggcacccacatcctgtgcatcaaggacatggccgggctgctgaagcccacggcctgcaccatgctggtcagctccctccgggaccggttccccgacctcccactgcacatccacacccacgacacgtcaggggcaggcgtggcagccatgctggcctgtgcccaggctggagctgatgtggtggatgtggcagctgattccatgtctgggatgacttcacagcccagcatgggggccctggtggcctgtaccagagggactcccctggacacagaggtgcccatggagcgcgtgtttgactacagtgagtactgggagggggctcggggactgtacgcggccttcgactgcacggccaccatgaagtctggcaactcggacgtgtatgaaaatgagatcccagggggccagtacaccaacctgcacttccaggcccacagcatggggcttggctccaagttcaaggaggtcaagaaggcctatgtggaggccaaccagatgctgggcgatctcatcaaggtgacgccctcctccaagatcgtgggggacctggcccagtttatggtgcagaatggattgagccgggcagaggccgaagctcaggcggaagagctgtcctttccccgctccgtggtggagttcctgcagggctacatcggtgtcccccatggggggttccccgaaccctttcgctctaaggtactgaaggacctgccaagggtggaggggcggcctggagcctccctccctcccctggatctgcaggcactggagaaggagctggtagaccggcatggggaggaggtgacgccggaagatgtgctctcagcagctatgtaccccgatgtgtttgcccacttcaaggacttcactgccacctttggccccctggatagcctgaatactcgcctcttcctgcagggacccaagatcgcagaggagtttgaggtggagctggagcggggcaagacgctgcacatcaaagccctggccgtgagcgacctgaaccgggccggccagaggcaggtcttctttgagctcaatgggcagctgcggtccatcttggtcaaggacacccaggccatgaaggagatgcacttccaccccaaggccctaaaggacgtgaagggccagatcggggcgcccatgcctgggaaggtgatagacatcaaagtggtggcaggggccaaggtggccaagggccagcccctgtgtgtgctcagtgccatgaagatggagactgtggtgacctcacccatggagggtactgtccgcaaggttcatgtgaccaaggacatgacactggaaggtgacgacctcatcctggagatcgagtgatcttgccccagaccggcagcctggccatccccaagccttcaacagaagctgtgctgccacggcaggcccaggccagccagtgcccgaggccaggaaggccgggccgtggaggtcctgtccacagctggacaggagagacaccgcctgcggtggttcattcctttcagccatcgtcctttcctccggcggacagctgcttacatgttcatctcttgccaaataagggtcccctcctcactggagactacaagtggtgggtcaggtggtcctaggacccaggggaggtttaggggtcctatctcctgggggaaggggagatctaagatgtcccaggtcctgggaagtttactcaataaagctggctttcccctgc

SEQ ID NO: 34 - DNA, 1850 bp, Homo sapiens
  L-3-hydroxyacyl-Coenzyme A dehydrogenase, short chain (1)..(1850): LocusID: 3033; NM_005327
cgcccccagagtctggctttccgcggctgcccgcctcgcgcgtcttccctgcccgggtctcctcgctgtcgccgccgctgccacaccatggccttcgtcaccaggcagttcatgcgttccgtgtcctcctcgtccaccgcctcggcctcggccaagaagataatcgtcaagcacgtgacggtcatcggcggcgggctgatgggcgccggcattgcccaggttgctgcagcaactggtcacacagtagtgttggtagaccagacagaggacatcctggcaaaatccaaaaagggaattgaggaaagccttaggaaagtggcaaagaagaagtttgcagaaaaccctaaggccggcgatgaatttgtggagaagaccctgagcaccatagcgaccagcacggatgcagcctccgttgtccacagcacagacttggtggtggaagccatcgtggagaatctgaaggtgaaaaacgagctcttcaaaaggctggacaagtttgctgctgaacatacaatctttgccagcaacacttcctccttgcatattacaagcatagctaatgccaccaccagacaagaccgattcgctggcctccatttcttcaacccagtgcctgtcatgaaacttgtggaggtcattaaaacaccaatgaccagccagaagacatttgaatctttggtagactttagcaaagccctaggaaagcatcctgtttcttgcaaggacactcctgggtttattgtgaaccgcctcctggttccatacctcatggaagcaatcaggctgtatgaacgaggtgacgcatccaaagaagacattgacactgctatgaaattaggagccggttaccccatgggcccatttgagcttctagattatgtcggactggatactacgaagttcatcgtggatgggtggcatgaaatggatgcagagaacccattacatcagcccagcccatccttaaataagctggtagcagagaacaagttcggcaagaagactggagaaggattttacaaatacaagtgatgtgcagcttctccggctctgagaagaacacctgagagcgctttccagccagtgccccgagtgcctgtgggaatgctctttggtcagacattccctcacacagtacagtttaataaatgtgcattttgattgtaatctatcgaagtgattattacaccagttacagcagtaatagattctccattaagaaataattcccttttttagtctgttcatttctgtgtattttctaaacagctttacacccttggtgccttggagcaaacatgttttttgaaccttgtcatttttgtgaagaattgcctagattccttctctcatcaacgggaaagtacttcctctgagagtgcgagtgcaccatgctcactgttgctgcgtgggagagtcacaagccactggcaagcaagtggtatagtctgtgaagcactgcagcgagcagcacctggatcttgcctttataagaacattttactacctgcagctttgagtcttgccctacattttgggcatgacataagatgtgtctttattcagctcgtcgtgaagatgctgctgctgaatgggtcagcatatctctgtttgcatggtttgcaggaggtcggttttcatggtcattcagttccacagatctgaatgattactgtctgtctgtgtcttttttccatgagaaatcactgttgcaaattgcctataaattgactctactaaaataacaatgtttcagtctgaaaatttgaattgaaaaaaatgtataatataaaattgtaatacactcaaatgattataaaagtaaaagttggtaatttaggcaaaaaaaa

SEQ ID NO: 35 - DNA, 2300 bp, Homo sapiens
  pyruvate dehydrogenase kinase, isoenzyme 2 (1)..(2300): LocusID: 5164; NM_002611
agggcaagggtagggaggaggcggccgaaccgcgtcgctgggccgaaaggtgcgcgagcgctgcccgcgcggggaccacaacccaagtcgcggccgccgcagccatgcgctgggtgtgggcgctgctgaagaatgcgtccctggcaggggcgcccaagtacatagagcacttcagcaagttctccccgtccccgctgtccatgaagcagtttctggacttcggatccagcaatgcctgtgagaaaacctccttcaccttcctcaggcaggagctgcctgtgcgcctggccaacatcatgaaagagatcaacctgcttcccgaccgagtgctgagcacaccctccgtgcagctggtgcagagctggtatgtccagagcctcctggacatcatggagttcctggacaaggatcccgaggaccatcgcaccctgagccagttcactgacgccctggtcaccatccggaaccggcacaacgacgtggtgcccaccatggcacaaggcgtgcttgagtacaaggacacctacggcgatgaccccgtctccaaccagaacatccagtacttcctggaccgcttctacctcagccgcatctccatccgcatgctcatcaaccagcacaccctcatctttgatggcagcaccaacccagcccatcccaaacacatcggcagcatcgaccccaactgcaacgtctctgaggtggtcaaagatgcctacgacatggctaagctcctgtgtgacaagtattacatggcctcacctgacctggagatccaggagatcaatgcagccaactccaaacagccgattcacatggtctacgtcccctcccacctctaccacatgctctttgagctcttcaagaatgccatgagggcgactgtggaaagccatgagtccagcctcattctcccacccatcaaggtcatggtggccttgggtgaggaagatctgtccatcaagatgagtgaccgaggtgggggtgttcccttgaggaagattgagcgactcttcagctacatgtactccacagcacccaccccccagcctggcaccgggggaacgccgctggctggctttggttatgggctccccatttcccgcctctacgccaagtacttccagggagacctgcagctcttctccatggaaggctttgggaccgatgctgtcatctatctcaaggccctgtccacggactcggtggagcgcctgcctgtctacaacaagtcagcctggcgccactaccagaccatccaggaggccggcgactggtgtgtgcccagcacggagcccaagaacacgtccacgtaccgcgtcagctaagggccgccgtgcatctgcacctgagaggacggactgccgcctctgggtccccccaccgtggtgcccctcaccatcctcctgggggagcagggggtgggttctccctgatgaccaggttctgtctctatggaagtcactgcggtgataggtctgtgatggtccctaagtgccagtccatctctgtggagacccctcggtggcctccctatctctgtgggcgatgcctgagggttagggatgtctccaccctgatggggtgtcccagagacattttcccatggcagtcctcctctctgagaccagggctgtcacttttctgccaggggtactgggtccccctcagcaccctccacagcacaggccttccaagtggatgtcccgttgccttattcccccagcccacaaaggcaccctggccttggtctgctgaagtgttaggaagagggtgggtgccctccagacctggggactgagtggggaaaggagttacacccgtgagtggggaatgaggctggtcctgcagcctctccctccgctcagggcttgaaggtcggtggcggagggggtggctctcacagggcccaactctaaagtggaagaaccttgttagaccgagagcttgccatccagccaagctgctcgaggccctgcagtggccttggcaatgtctgtgccacctcctgagccctcccagcatgtcctcacatgctcatgcccacccgctcctccacaagcctagtccatcctgcctgagctccagcccccagcccccactgtgcccagacatgtgtgctcagggtggctttctccctaggaccttctgtgtatatagttagttttataaccctgaatgcccccacccttcccctaagcacacaggggttaaagctgtgtgtccctcccagtggctgtggcagtgacagtgacacccacacccacagtaaagaggagactgaatgagaaaaaaaaaaa

SEQ ID NO: 36 - DNA, 2990 bp, Homo sapiens
  citrate synthase transcript variant 1 (1)..(2990): LocusID: 1431; NM_004077
agtgggcggggcctccttgaggaccccgggctgggcgccgccgccggttcgtctactctttccttcagccgcctcctttcaaccttgtcaacccgtcggcgcggcctctggtgcagcggcggcggctcctgttcctgccgcagctctctccctttcttacctccccaccagatcccggagatcgcccgccatggctttacttactgcggccgcccggctcttgggaaccaagaatgcatcttgtcttgttcttgcagcccggcatgccagtgcttcctccacgaatttgaaagacatattggctgacctgatacctaaggagcaggccagaattaagactttcaggcagcaacatggcaagacggtggtgggccaaatcactgtggacatgatgtatggtggcatgagaggcatgaagggattggtctatgaaacatcagttcttgatcctgatgagggcatccgtttccgaggctttagtatccctgaatgccagaaactgctacccaaggctaagggtggggaagaacccctgcctgagggcttattttggctgctggtaactggacatatcccaacagaggaacaggtatcttggctctcaaaagagtgggcaaagagggcagctctgccttcccatgtggtcaccatgctggacaactttcccaccaatctacaccccatgtctcagctcagtgcagctgttacagccctcaacagtgaaagtaactttgcccgagcatatgcacagggtatcagccgaaccaagtactgggagttgatttatgaagactctatggatctaatcgcaaagctaccttgtgttgcagcaaagatctaccgaaatctctacagagaaggcagcggtattggggccattgactctaacctggactggtctcacaatttcaccaacatgttaggctatactgatcatcagttcactgagctcacgcgcctgtacctcaccatccacagtgaccatgagggtggcaatgtaagtgcccataccagccatttggtgggcagtgccctttccgacccttacctgtcctttgcagcagccatgaacgggctggcagggcctctccatggactggcaaatcaggaagtgcttgtctggctaacacagctgcagaaggaagttggcaaagatgtgtcagatgagaagttacgagactacatctggaacacactcaactcaggacgggttgttccaggctatggccatgcagtactaaggaagactgatccgcgatatacctgtcagcgagagtttgctctgaaacacctgcctaatgaccccatgtttaagttggttgctcagctgtacaagattgtgcccaatgtcctcttagagcagggtaaagccaagaatccttggcccaatgtagatgctcacagtggggtgctgctccagtattatggcatgacggagatgaattactacacggtcctgtttggggtgtcacgagcattgggtgtactggcacagctcatctggagccgagccttaggcttccctctagaaaggcccaagtccatgagcacagagggtctgatgaagtttgtggactctaagtcagggtaaaactggagactgggtgaaagtgactaccagaaagtgaggaagcctaaataaaaagtatacttttgtttcagggggcctttaaagacttaagattaaattatatctgaggcactgataatatgtttgaggttaaaatataaattaagactttaaaagatgaaaaatggtcccttcttccctaatcagctcccttcccctgcctggtatgagttgcccatcatacgcatggtcctggaggatgaccaggactaatgcatgtggtatgagtaggtttggccccctcactatctctagagtgagaatctggctcctgtttccatgggtcaaagccggttgcagagaatctgtagtcactttggagctttagcttctctgccaagccctcaataagccagcaaaccaggactctgccccttctgtttccataggaatcatgttggatagtcagctgtaccaagccccttggccctctcccatgcacacaaacacctcctagcaagacctgttggttagctggacatgctttggcaatttttttatactaccaagtgaccataaaggcatggcatttgttgtgactggcacccaatgtttgattttttttttaaaactatccaattaaaattaaggtctgggagtgttctgtttcccattactttaatactcacctcctcccagactttctacacctgttgcacctcaggcagaggatgttctggacctccccctcttggtccctactagagacctctcaacagatctgtgggcccagtcattgggttttatcagtgcttaatgtgaactaagttttttacttccacagaatacaagccactaccttctgacctccccaccccccaccaacccccatcttttaatatgctgtggggcatagaactccggaatgaccagcatgatattttcagagtcttgtccccggggtattagcacctctttttgaacagggaattgattcaagattggacatggtctcctctgattatcaggtactggggctgagggcattaaaaatagtaagcctccctcctcgtcccctgcctcaagaaattgcctccttatttatcaacatctttttcctccctttccctgagagctcacagtacaatgtttcagaagccccatttgcacaggttttcagcaactcagaatgctctacttctttttctttgagaaaggattaagatacactcctgctgtgcccccatctttcctccaaactcctgcctgtgtttgtgtggatacccagtcccagaaccacactgttgagttggacacactgtaaacccctgggtaactgtcaagtcatgatggagacttcaggttgttctgtataaaatgcaaaataaatgtttttattaacaatgaaaaaaaaaaaaaa

SEQ ID NO: 37 - DNA, 3070 bp, Homo sapiens
  citrate synthase transcript variant 2 (1)..(3070): LocusID: 1431; NM_198324
agtgggcggggcctccttgaggaccccgggctgggcgccgccgccggttcgtctactctttccttcagccgcctcctttcaaccttgtcaacccgtcggcgcggcctctggtgcagcggcggcggctcctgttcctgccgcagctctctccctttcttacctccccaccagatcccggagatcgcccgccatggctttacttactgcggccgcccggctcttgggaaccaaggcacccagtggcaagtactagctgagcatttgggagatgcttgtcttacttggctgttgcttctcctgctgctggggaaaaggaatgcatcttgtcttgttcttgcagcccggcatgccagtgcttcctccacgaatttgaaagacatattggctgacctgatacctaaggagcaggccagaattaagactttcaggcagcaacatggcaagacggtggtgggccaaatcactgtggacatgatgtatggtggcatgagaggcatgaagggattggtctatgaaacatcagttcttgatcctgatgagggcatccgtttccgaggctttagtatccctgaatgccagaaactgctacccaaggctaagggtggggaagaacccctgcctgagggcttattttggctgctggtaactggacatatcccaacagaggaacaggtatcttggctctcaaaagagtgggcaaagagggcagctctgccttcccatgtggtcaccatgctggacaactttcccaccaatctacaccccatgtctcagctcagtgcagctgttacagccctcaacagtgaaagtaactttgcccgagcatatgcacagggtatcagccgaaccaagtactgggagttgatttatgaagactctatggatctaatcgcaaagctaccttgtgttgcagcaaagatctaccgaaatctctacagagaaggcagcggtattggggccattgactctaacctggactggtctcacaatttcaccaacatgttaggctatactgatcatcagttcactgagctcacgcgcctgtacctcaccatccacagtgaccatgagggtggcaatgtaagtgcccataccagccatttggtgggcagtgccctttccgacccttacctgtcctttgcagcagccatgaacgggctggcagggcctctccatggactggcaaatcaggaagtgcttgtctggctaacacagctgcagaaggaagttggcaaagatgtgtcagatgagaagttacgagactacatctggaacacactcaactcaggacgggttgttccaggctatggccatgcagtactaaggaagactgatccgcgatatacctgtcagcgagagtttgctctgaaacacctgcctaatgaccccatgtttaagttggttgctcagctgtacaagattgtgcccaatgtcctcttagagcagggtaaagccaagaatccttggcccaatgtagatgctcacagtggggtgctgctccagtattatggcatgacggagatgaattactacacggtcctgtttggggtgtcacgagcattgggtgtactggcacagctcatctggagccgagccttaggcttccctctagaaaggcccaagtccatgagcacagagggtctgatgaagtttgtggactctaagtcagggtaaaactggagactgggtgaaagtgactaccagaaagtgaggaagcctaaataaaaagtatacttttgtttcagggggcctttaaagacttaagattaaattatatctgaggcactgataatatgtttgaggttaaaatataaattaagactttaaaagatgaaaaatggtcccttcttccctaatcagctcccttcccctgcctggtatgagttgcccatcatacgcatggtcctggaggatgaccaggactaatgcatgtggtatgagtaggtttggccccctcactatctctagagtgagaatctggctcctgtttccatgggtcaaagccggttgcagagaatctgtagtcactttggagctttagcttctctgccaagccctcaataagccagcaaaccaggactctgccccttctgtttccataggaatcatgttggatagtcagctgtaccaagccccttggccctctcccatgcacacaaacacctcctagcaagacctgttggttagctggacatgctttggcaatttttttatactaccaagtgaccataaaggcatggcatttgttgtgactggcacccaatgtttgattttttttttaaaactatccaattaaaattaaggtctgggagtgttctgtttcccattactttaatactcacctcctcccagactttctacacctgttgcacctcaggcagaggatgttctggacctccccctcttggtccctactagagacctctcaacagatctgtgggcccagtcattgggttttatcagtgcttaatgtgaactaagttttttacttccacagaatacaagccactaccttctgacctccccaccccccaccaacccccatcttttaatatgctgtggggcatagaactccggaatgaccagcatgatattttcagagtcttgtccccggggtattagcacctctttttgaacagggaattgattcaagattggacatggtctcctctgattatcaggtactggggctgagggcattaaaaatagtaagcctccctcctcgtcccctgcctcaagaaattgcctccttatttatcaacatctttttcctccctttccctgagagctcacagtacaatgtttcagaagccccatttgcacaggttttcagcaactcagaatgctctacttctttttctttgagaaaggattaagatacactcctgctgtgcccccatctttcctccaaactcctgcctgtgtttgtgtggatacccagtcccagaaccacactgttgagttggacacactgtaaacccctgggtaactgtcaagtcatgatggagacttcaggttgttctgtataaaatgcaaaataaatgtttttattaacaatgaaaaaaaaaaa

SEQ ID NO: 38 - DNA, 4587 bp, Homo sapiens
  fibroblast growth factor receptor 2 transcript variant 1 (1)..(4587): LocusID: 2263; NM_000141
gagcgggcgagggagcgcgcgcggccgccacaaagctcgggcgccgcggggctgcatgcggcgtacctggcccggcgcggcgactgctctccgggctggcgggggccggccgcgagccccgggggccccgaggccgcagcttgcctgcgcgctctgagccttcgcaactcgcgagcaaagtttggtggaggcaacgccaagcctgagtcctttcttcctctcgttccccaaatccgagggcagcccgcgggcgtcatgcccgcgctcctccgcagcctggggtacgcgtgaagcccgggaggcttggcgccggcgaagacccaaggaccactcttctgcgtttggagttgctccccacaaccccgggctcgtcgctttctccatcccgacccacgcggggcgcggggacaacacaggtcgcggaggagcgttgccattcaagtgactgcagcagcagcggcagcgcctcggttcctgagcccaccgcaggctgaaggcattgcgcgtagtccatgcccgtagaggaagtgtgcagatgggattaacgtccacatggagatatggaagaggaccggggattggtaccgtaaccatggtcagctggggtcgtttcatctgcctggtcgtggtcaccatggcaaccttgtccctggcccggccctccttcagtttagttgaggataccacattagagccagaagagccaccaaccaaataccaaatctctcaaccagaagtgtacgtggctgcgccaggggagtcgctagaggtgcgctgcctgttgaaagatgccgccgtgatcagttggactaaggatggggtgcacttggggcccaacaataggacagtgcttattggggagtacttgcagataaagggcgccacgcctagagactccggcctctatgcttgtactgccagtaggactgtagacagtgaaacttggtacttcatggtgaatgtcacagatgccatctcatccggagatgatgaggatgacaccgatggtgcggaagattttgtcagtgagaacagtaacaacaagagagcaccatactggaccaacacagaaaagatggaaaagcggctccatgctgtgcctgcggccaacactgtcaagtttcgctgcccagccggggggaacccaatgccaaccatgcggtggctgaaaaacgggaaggagtttaagcaggagcatcgcattggaggctacaaggtacgaaaccagcactggagcctcattatggaaagtgtggtcccatctgacaagggaaattatacctgtgtggtggagaatgaatacgggtccatcaatcacacgtaccacctggatgttgtggagcgatcgcctcaccggcccatcctccaagccggactgccggcaaatgcctccacagtggtcggaggagacgtagagtttgtctgcaaggtttacagtgatgcccagccccacatccagtggatcaagcacgtggaaaagaacggcagtaaatacgggcccgacgggctgccctacctcaaggttctcaaggccgccggtgttaacaccacggacaaagagattgaggttctctatattcggaatgtaacttttgaggacgctggggaatatacgtgcttggcgggtaattctattgggatatcctttcactctgcatggttgacagttctgccagcgcctggaagagaaaaggagattacagcttccccagactacctggagatagccatttactgcataggggtcttcttaatcgcctgtatggtggtaacagtcatcctgtgccgaatgaagaacacgaccaagaagccagacttcagcagccagccggctgtgcacaagctgaccaaacgtatccccctgcggagacaggtaacagtttcggctgagtccagctcctccatgaactccaacaccccgctggtgaggataacaacacgcctctcttcaacggcagacacccccatgctggcaggggtctccgagtatgaacttccagaggacccaaaatgggagtttccaagagataagctgacactgggcaagcccctgggagaaggttgctttgggcaagtggtcatggcggaagcagtgggaattgacaaagacaagcccaaggaggcggtcaccgtggccgtgaagatgttgaaagatgatgccacagagaaagacctttctgatctggtgtcagagatggagatgatgaagatgattgggaaacacaagaatatcataaatcttcttggagcctgcacacaggatgggcctctctatgtcatagttgagtatgcctctaaaggcaacctccgagaatacctccgagcccggaggccacccgggatggagtactcctatgacattaaccgtgttcctgaggagcagatgaccttcaaggacttggtgtcatgcacctaccagctggccagaggcatggagtacttggcttcccaaaaatgtattcatcgagatttagcagccagaaatgttttggtaacagaaaacaatgtgatgaaaatagcagactttggactcgccagagatatcaacaatatagactattacaaaaagaccaccaatgggcggcttccagtcaagtggatggctccagaagccctgtttgatagagtatacactcatcagagtgatgtctggtccttcggggtgttaatgtgggagatcttcactttagggggctcgccctacccagggattcccgtggaggaactttttaagctgctgaaggaaggacacagaatggataagccagccaactgcaccaacgaactgtacatgatgatgagggactgttggcatgcagtgccctcccagagaccaacgttcaagcagttggtagaagacttggatcgaattctcactctcacaaccaatgaggaatacttggacctcagccaacctctcgaacagtattcacctagttaccctgacacaagaagttcttgttcttcaggagatgattctgttttttctccagaccccatgccttacgaaccatgccttcctcagtatccacacataaacggcagtgttaaaacatgaatgactgtgtctgcctgtccccaaacaggacagcactgggaacctagctacactgagcagggagaccatgcctcccagagcttgttgtctccacttgtatatatggatcagaggagtaaataattggaaaagtaatcagcatatgtgtaaagatttatacagttgaaaacttgtaatcttccccaggaggagaagaaggtttctggagcagtggactgccacaagccaccatgtaacccctctcacctgccgtgcgtactggctgtggaccagtaggactcaaggtggacgtgcgttctgccttccttgttaattttgtaataattggagaagatttatgtcagcacacacttacagagcacaaatgcagtatataggtgctggatgtatgtaaatatattcaaattatgtataaatatatattatatatttacaaggagttattttttgtattgattttaaatggatgtcccaatgcacctagaaaattggtctctctttttttaatagctatttgctaaatgctgttcttacacataatttcttaattttcaccgagcagaggtggaaaaatacttttgctttcagggaaaatggtataacgttaatttattaataaattggtaatatacaaaacaattaatcatttatagttttttttgtaatttaagtggcatttctatgcaggcagcacagcagactagttaatctattgcttggacttaactagttatcagatcctttgaaaagagaatatttacaatatatgactaatttggggaaaatgaagttttgatttatttgtgtttaaatgctgctgtcagacgattgttcttagacctcctaaatgccccatattaaaagaactcattcataggaaggtgtttcattttggtgtgcaaccctgtcattacgtcaacgcaacgtctaactggacttcccaagataaatggtaccagcgtcctcttaaaagatgccttaatccattccttgaggacagaccttagttgaaatgatagcagaatgtgcttctctctggcagctggccttctgcttctgagttgcacattaatcagattagcctgattctcttcagtgaattttgataatggcttccagactctttgcgttggagacgcctgttaggatcttcaagtcccatcatagaaaattgaaacacagagttgttctgctgatagttttggggatacgtccatctttttaagggattgctttcatctaattctggcaggacctcaccaaaagatccagcctcatacctacatcagacaaaatatcgccgttgttccttctgtactaaagtattgtgttttgctttggaaacacccactcactttgcaatagccgtgcaagatgaatgcagattacactgatcttatgtgttacaaaattggagaaagtatttaataaaacctgttaatttttatactgacaataaaaatgtttctacagatattaatgttaacaagacaaaataaatgtcacgcaacttaaaaaaaaaaaaaaaa

SEQ ID NO: 39 - DNA, 4574 bp, Homo sapiens
  fibroblast growth factor receptor 2 transcript variant 2 (1)..(4574): LocusID: 2263; NM_022969
gagcgggcgagggagcgcgcgcggccgccacaaagctcgggcgccgcggggctgcatgcggcgtacctggcccggcgcggcgactgctctccgggctggcgggggccggccgcgagccccgggggccccgaggccgcagcttgcctgcgcgctctgagccttcgcaactcgcgagcaaagtttggtggaggcaacgccaagcctgagtcctttcttcctctcgttccccaaatccgaggcagcccgcgggcgtcatgcccgcgctcctccgcagcctggggtacgcgctgaagcccgggaggcttggcgccggcgaagacccaaggaccactcttctgcgtttggagttgctccccacaaccccgggctcgtcgctttctccatcccgacccagccggggcgcggggacaacacaggtcgcggaggagcgttgccattcaagtgactgcagcagcagcggcagcgcctcggttcctgagcccaccgcaggctgaaggcattgcgcgtagtccatgcccgtagaggaagtgtgcagatgggattaacgtccacatggagatatggaagaggaccggggattggtaccgtaaccatggtcagctggggtcgtttcatctgcctggtcgtggtcaccatggcaaccttgtccctggcccggccctccttcagtttagttgaggataccacattagagccagaagagccaccaaccaaataccaaatctctcaaccagaagtgtacgtggctgcgccaggggagtcgctagaggtgcgctgcctgttgaaagatgccgccgtgatcagttggactaaggatggggtgcacttggggcccaacaataggacagtgcttattggggagtacttgcagataaagggcgccacgcctagagactccggcctctatgcttgtactgccagtaggactgtagacagtgaaacttggtacttcatggtgaatgtcacagatgccatctcatccggagatgatgaggatgacaccgatggtgcggaagattttgtcagtgagaacagtaacaacaagagagcaccatactggaccaacacagaaaagatggaaaagcggctccatgctgtgcctgcggccaacactgtcaagtttcgctgcccagccggggggaacccaatgccaaccatgcggtggctgaaaaacgggaaggagtttaagcaggagcatcgcattggaggctacaaggtacgaaaccagcactggagcctcattatggaaagtgtggtcccatctgacaagggaaattatacctgtgtggtggagaatgaatacgggtccatcaatcacacgtaccacctggatgttgtggagcgatcgcctcaccggcccatcctccaagccggactgccggcaaatgcctccacagtggtcggaggagacgtagagtttgtctgcaaggtttacagtgatgcccagccccacatccagtggatcaagcacgtggaaaagaacggcagtaaatacgggcccgacgggctgccctacctcaaggttctcaagcactcggggataaatagttccaatgcagaagtgctggctctgttcaatgtgaccgaggcggatgctggggaatatatatgtaaggtctccaattatatagggcaggccaaccagtctgcctggctcactgtcctgccaaaacagcaagcgcctggaagagaaaaggagattacagcttccccagactacctggagatagccatttactgcataggggtcttcttaatcgcctgtatggtggtaacagtcatcctgtgccgaatgaagaacacgaccaagaagccagacttcagcagccagccggctgtgcacaagctgaccaaacgtatccccctgcggagacaggtaacagtttcggctgagtccagctcctccatgaactccaacaccccgctggtgaggataacaacacgcctctcttcaacggcagacacccccatgctggcaggggtctccgagtatgaacttccagaggacccaaaatgggagtttccaagagataagctgacactgggcaagcccctgggagaaggttgctttgggcaagtggtcatggcggaagcagtgggaattgacaaagacaagcccaaggaggcggtcaccgtggccgtgaagatgttgaaagatgatgccacagagaaagacctttctgatctggtgtcagagatggagatgatgaagatgattgggaaacacaagaatatcataaatcttcttggagcctgcacacaggatgggcctctctatgtcatagttgagtatgcctctaaaggcaacctccgagaatacctccgagcccggaggccacccgggatggagtactcctatgacattaaccgtgttcctgaggagcagatgaccttcaaggacttggtgtcatgcacctaccagctggccagaggcatggagtacttggcttcccaaaaatgtattcatcgagatttagcagccagaaatgttttggtaacagaaaacaatgtgatgaaaatagcagactttggactcgccagagatatcaacaatatagactattacaaaaagaccaccaatgggcggcttccagtcaagtggatggctccagaagccctgtttgatagagtatacactcatcagagtgatgtctggtccttcggggtgttaatgtgggagatcttcactttagggggctcgccctacccagggattcccgtggaggaactttttaagctgctgaaggaaggacacagaatggataagccagccaactgcaccaacgaactgtacatgatgatgagggactgttggcatgcagtgccctcccagagaccaacgttcaagcagttggtagaagacttggatcgaattctcactctcacaaccaatgaggaatacttggacctcagccaacctctcgaacagtattcacctagttaccctgacacaagaagttcttgttcttcaggagatgattctgttttttctccagaccccatgccttacgaaccatgccttcctcagtatccacacataaacggcagtgttaaaacatgaatgactgtgtctgcctgtccccaaacaggacagcactgggaacctagctacactgagcagggagaccatgcctcccagagcttgttgtctccacttgtatatatggatcagaggagtaaataattggaaaagtaatcagcatatgtgtaaagatttatacagttgaaaacttgtaatcttccccaggaggagaagaaggtttctggagcagtggactgccacaagccaccatgtaacccctctcacctgccgtgcgtactggctgtggaccagtaggactcaaggtggacgtgcgttctgccttccttgttaattttgtaataattggagaagatttatgtcagcacacacttacagagcacaaatgcagtatataggtgctggatgtatgtaaatatattcaaattatgtataaatatatattatatatttacaaggagttattttttgtattgattttaaatggatgtcccaatgcacctagaaaattggtctctctttttttaatagctatttgctaaatgctgttcttacacataatttcttaattttcaccgagcagaggtggaaaaatacttttgctttcagggaaaatggtataacgttaatttattaataaattggtaatatacaaaacaattaatcatttatagttttttttgtaatttaagtggcatttctatgcaggcagcacagcagactagttaatctattgcttggacttaactagttatcagatcctttgaaaagagaatatttacaatatatgactaatttggggaaaatgaagttttgatttatttgtgtttaaatgctgctgtcagacgattgttcttagacctcctaaatgccccatattaaaagaactcattcataggaaggtgtttcattttggtgtgcaaccctgtcattacgtcaacgcaacgtctaactggacttcccaagataaatggtaccagcgtcctcttaaaagatgccttaatccattccttgaggacagaccttagttgaaatgatagcagaatgtgcttctctctggcagctggccttctgcttctgagttgcacattaatcagattagcctgattctcttcagtgaattttgataatggcttccagactctttgcgttggagacgcctgttaggatcttcaagtcccatcatagaaaattgaaacacagagttgttctgctgatagttttggggatacgtccatctttttaagggattgctttcatctaattctggcaggacctcaccaaaagatccagcctcatacctacatcagacaaaatatcgccgttgttccttctgtactaaagtattgtgttttgctttggaaacacccactcactttgcaatagccgtgcaagatgaatgcagattacactgatcttatgtgttacaaaattggagaaagtatttaataaaacctgttaatttttatactgacaataaaaatgtttctacagatattaatgttaacaagacaaaataaatgtcacgcaactt

SEQ ID NO: 40 - DNA, 4223 bp, Homo sapiens
  fibroblast growth factor receptor 2 transcript variant 3 (1)..(4223): LocusID: 2263; NM_022970
gagcgggcgagggagcgcgcgcggccgccacaaagctcgggcgccgcggggctgcatgcggcgtacctggcccggcgcggcgactgctctccgggctggcgggggccggccgcgagccccgggggccccgaggccgcagcttgcctgcgcgctctgagccttcgcaactcgcgagcaaagtttggtggaggcaacgccaagcctgagtcctttcttcctctcgttccccaaatccgagggcagcccgcgggcgtcatgcccgcgctcctccgcagcctggggtacgcgtgaagcccgggaggcttggcgccggcgaagacccaaggaccactcttctgcgtttggagttgctccccccaaccccgggctcgtcgctttctccatcccgacccacgcggggcgcggggacaacacaggtcgcggaggagcgttgccattcaagtgactgcagcagcagcggcagcgcctcggttcctgagcccaccgcaggctgaaggcattgcgcgtagtccatgcccgtagaggaagtgtgcagatgggattaacgtccacatggagatatggaagaggaccggggattggtaccgtaaccatggtcagctggggtcgtttcatctgcctggtcgtggtcaccatggcaaccttgtccctggcccggccctccttcagtttagttgaggataccacattagagccagaagagccaccaaccaaataccaaatctctcaaccagaagtgtacgtggctgcgccaggggagtcgctagaggtgcgctgcctgttgaaagatgccgccgtgatcagttggactaaggatggggtgcacttggggcccaacaataggacagtgcttattggggagtacttgcagataaagggcgccacgcctagagactccggcctctatgcttgtactgccagtaggactgtagacagtgaaacttggtacttcatggtgaatgtcacagatgccatctcatccggagatgatgaggatgacaccgatggtgcggaagattttgtcagtgagaacagtaacaacaagagagcaccatactggaccaacacagaaaagatggaaaagcggctccatgctgtgcctgcggccaacactgtcaagtttcgctgcccagccggggggaacccaatgccaaccatgcggtggctgaaaaacgggaaggagtttaagcaggagcatcgcattggaggctacaaggtacgaaaccagcactggagcctcattatggaaagtgtggtcccatctgacaagggaaattatacctgtgtggtggagaatgaatacgggtccatcaatcacacgtaccacctggatgttgtggagcgatcgcctcaccggcccatcctccaagccggactgccggcaaatgcctccacagtggtcggaggagacgtagagtttgtctgcaaggtttacagtgatgcccagccccacatccagtggatcaagcacgtggaaaagaacggcagtaaatacgggcccgacgggctgccctacctcaaggttctcaaggtttcggctgagtccagctcctccatgaactccaacaccccgctggtgaggataacaacacgcctctcttcaacggcagacacccccatgctggcaggggtctccgagtatgaacttccagaggacccaaaatgggagtttccaagagataagctgacactgggcaagcccctgggagaaggttgctttgggcaagtggtcatggcggaagcagtgggaattgacaaagacaagcccaaggaggcggtcaccgtggccgtgaagatgttgaaagatgatgccacagagaaagacctttctgatctggtgtcagagatggagatgatgaagatgattgggaaacacaagaatatcataaatcttcttggagcctgcacacaggatgggcctctctatgtcatagttgagtatgcctctaaaggcaacctccgagaatacctccgagcccggaggccacccgggatggagtactcctatgacattaaccgtgttcctgaggagcagatgaccttcaaggacttggtgtcatgcacctaccagctggccagaggcatggagtacttggcttcccaaaaatgtattcatcgagatttagcagccagaaatgttttggtaacagaaaacaatgtgatgaaaatagcagactttggactcgccagagatatcaacaatatagactattacaaaaagaccaccaatgggcggcttccagtcaagtggatggctccagaagccctgtttgatagagtatacactcatcagagtgatgtctggtccttcggggtgttaatgtgggagatcttcactttagggggctcgccctacccagggattcccgtggaggaactttttaagctgctgaaggaaggacacagaatggataagccagccaactgcaccaacgaactgtacatgatgatgagggactgttggcatgcagtgccctcccagagaccaacgttcaagcagttggtagaagacttggatcgaattctcactctcacaaccaatgaggaatacttggacctcagccaacctctcgaacagtattcacctagttaccctgacacaagaagttcttgttcttcaggagatgattctgttttttctccagaccccatgccttacgaaccatgccttcctcagtatccacacataaacggcagtgttaaaacatgaatgactgtgtctgcctgtccccaaacaggacagcactgggaacctagctacactgagcagggagaccatgcctcccagagcttgttgtctccacttgtatatatggatcagaggagtaaataattggaaaagtaatcagcatatgtgtaaagatttatacagttgaaaacttgtaatcttccccaggaggagaagaaggtttctggagcagtggactgccacaagccaccatgtaacccctctcacctgccgtgcgtactggctgtggaccagtaggactcaaggtggacgtgcgttctgccttccttgttaattttgtaataattggagaagatttatgtcagcacacacttacagagcacaaatgcagtatataggtgctggatgtatgtaaatatattcaaattatgtataaatatatattatatatttacaaggagttattttttgtattgattttaaatggatgtcccaatgcacctagaaaattggtctctctttttttaatagctatttgctaaatgctgttcttacacataatttcttaattttcaccgagcagaggtggaaaaatacttttgctttcagggaaaatggtataacgttaatttattaataaattggtaatatacaaaacaattaatcatttatagttttttttgtaatttaagtggcatttctatgcaggcagcacagcagactagttaatctattgcttggacttaactagttatcagatcctttgaaaagagaatatttacaatatatgactaatttggggaaaatgaagttttgatttatttgtgtttaaatgctgctgtcagacgattgttcttagacctcctaaatgccccatattaaaagaactcattcataggaaggtgtttcattttggtgtgcaaccctgtcattacgtcaacgcaacgtctaactggacttcccaagataaatggtaccagcgtcctcttaaaagatgccttaatccattccttgaggacagaccttagttgaaatgatagcagaatgtgcttctctctggcagctggccttctgcttctgagttgcacattaatcagattagcctgattctcttcagtgaattttgataatggcttccagactctttgcgttggagacgcctgttaggatcttcaagtcccatcatagaaaattgaaacacagagttgttctgctgatagttttggggatacgtccatctttttaagggattgctttcatctaattctggcaggacctcaccaaaagatccagcctcatacctacatcagacaaaatatcgccgttgttccttctgtactaaagtattgtgttttgctttggaaacacccactcactttgcaatagccgtgcaagatgaatgcagattacactgatcttatgtgttacaaaattggagaaagtatttaataaaacctgttaatttttatactgacaataaaaatgtttctacagatattaatgttaacaagacaaaataaatgtcacgcaactt

SEQ ID NO: 41 - DNA, 1800 bp, Homo sapiens
  fibroblast growth factor receptor 2 transcript variant 4 (1)..(1800): LocusID: 2263; NM_022971
gagcgggcgagggagcgcgcgcggccgccacaaagctcgggcgccgcggggctgcatgcggcgtacctggcccggcgcggcgactgctctccgggctggcgggggccggccgcgagccccgggggccccgaggccgcagcttgcctgcgcgctctgagccttcgcaactcgcgagcaaagtttggtggaggcaacgccaagcctgagtcctttcttcctctcgttccccaaatccgagggcagcccgcgggcgtcatgcccgcgctcctccgcagcctggggtacgcgctgaagcccgggaggcttggcgccggcgaagacccaaggaccactcttctgcgtttggagttgctccccacaaccccgggctcgtcgctttctccatcccgacccacgcggggcgcggggacaacacaggtcgcggaggagcgttgccattcaagtgactgcagcagcagcggcagcgcctcggttcctgagcccaccgcaggctgaaggcattgcgcgtagtccatgcccgtagaggaagtgtgcagatgggattaacgtccacatggagatatggaagaggaccggggattggtaccgtaaccatggtcagctggggtcgtttcatctgcctggtcgtggtcaccatggcaaccttgtccctggcccggccctccttcagtttagttgaggataccacattagagccagaagagccaccaaccaaataccaaatctctcaaccagaagtgtacgtggctgcgccaggggagtcgctagaggtgcgctgcctgttgaaagatgccgccgtgatcagttggactaaggatggggtgcacttggggcccaacaataggacagtgcttattggggagtacttgcagataaagggcgccacgcctagagactccggcctctatgcttgtactgccagtaggactgtagacagtgaaacttggtacttcatggtgaatgtcacagatgccatctcatccggagatgatgaggatgacaccgatggtgcggaagattttgtcagtgagaacagtaacaacaagagagcaccatactggaccaacacagaaaagatggaaaagcggctccatgctgtgcctgcggccaacactgtcaagtttcgctgcccagccggggggaacccaatgccaaccatgcggtggctgaaaaacgggaaggagtttaagcaggagcatcgcattggaggctacaaggtacgaaaccagcactggagcctcattatggaaagtgtggtcccatctgacaagggaaattatacctgtgtggtggagaatgaatacgggtccatcaatcacacgtaccacctggatgttgtgggcagccagggtttatgagctttgcatgatcctcatggttcccaagcgtcatctgtgtaaagtggacgtggtatgaaatgtctgacattttggaagctgagattactctgaaaatgttaattgggcaggtgaaaagggtacagatgtgctgtagcagacctttggttttaaaagagaagcatcatttccccaacagggcaactgtagaaggccagctgaagagtaaaggaaaaggtctgaggactgagcctgtggctggctggaaaaaggtgaatgttgagggcccttcacttccatcacaagaaagtcattagacggtaccaattcagtgtctgttcctggcatctatttcctctgtgcaaagggaaccatgtatatgagcttataaatacatttttgtcagagtgcacagataagtaggccattttaattaaacattgaagaccctgtctcaaaaaaa

SEQ ID NO: 42 - DNA, 4575 bp, Homo sapiens
  fibroblast growth factor receptor 2 transcript variant 5 (1)..(4575): LocusID: 2263; NM_022972
gagcgggcgagggagcgcgcgcggccgccacaaagctcgggcgccgcggggctgcatgcggcgtacctggcccggcgcggcgactgctctccgggctggcgggggccggccgcgagccccgggggccccgaggccgcagcttgcctgcgcgctctgagccttcgcaactcgcgagcaaagtttggtggaggcaacgccaagcctgagtcctttcttcctctcgttccccaaatccgagggcagcccgcgggcgtcatgcccgcgctcctccgcagcctggggtacgcgctgaagcccgggaggcttggcgccggcgaagacccaaggaccactcttctgcgtttggagttgctccccacaaccccgggctcgtcgctttctccatcccgacccagccggggcgcggggacaacacaggtcgcggaggagcgttgccattcaagtgactgcagcagcagcggcagcgcctcggttcctgagcccaccgcaggctgaaggcattgcgcgtagtccatgcccgtagaggaagtgtgcagatgggattaacgtccacatggagatatggaagaggaccggggattggtaccgtaaccatggtcagctggggtcgtttcatctgcctggtcgtggtcaccatggcaaccttgtccctggcccggccctccttcagtttagttgaggataccacattagagccagaagagccaccaaccaaataccaaatctctcaaccagaagtgtacgtggctgcgccaggggagtcgctagaggtgcgctgcctgttgaaagatgccgccgtgatcagttggactaaggatggggtgcacttggggcccaacaataggacagtgcttattggggagtacttgcagataaagggcgccacgcctagagactccggcctctatgcttgtactgccagtaggactgtagacagtgaaacttggtacttcatggtgaatgtcacagatgccatctcatccggagatgatgaggatgacaccgatggtgcggaagattttgtcagtgagaacagtaacaacaagagagcaccatactggaccaacacagaaaagatggaaaagcggctccatgctgtgcctgcggccaacactgtcaagtttcgctgcccagccggggggaacccaatgccaaccatgcggtggctgaaaaacgggaaggagtttaagcaggagcatcgcattggaggctacaaggtacgaaaccagcactggagcctcattatggaaagtgtggtcccatctgacaagggaaattatacctgtgtggtggagaatgaatacgggtccatcaatcacacgtaccacctggatgttgtggagcgatcgcctcaccggcccatcctccaagccggactgccggcaaatgcctccacagtggtcggaggagacgtagagtttgtctgcaaggtttacagtgatgcccagccccacatccagtggatcaagcacgtggaaaagaacggcagtaaatacgggcccgacgggctgccctacctcaaggttctcaaggttctcaaggccgccggtgttaacaccacggacaaagagattgaggttctctatattcggaatgtaacttttgaggacgctggggaatatacgtgcttggcgggtaattctattgggatatcctttcactctgcatggttgacagttctgccagcgcctggaagagaaaaggagattacagcttccccagactacctggagatagccatttactgcataggggtcttcttaatcgcctgtatggtggtaacagtcatcctgtgccgaatgaagaacacgaccaagaagccagacttcagcagccagccggctgtgcacaagctgaccaaacgtatccccctgcggagacaggtttcggctgagtccagctcctccatgaactccaacaccccgctggtgaggataacaacacgcctctcttcaacggcagacacccccatgctggcaggggtctccgagtatgaacttccagaggacccaaaatgggagtttccaagagataagctgacactgggcaagcccctgggagaaggttgctttgggcaagtggtcatggcggaagcagtgggaattgacaaagacaagcccaaggaggcggtcaccgtggccgtgaagatgttgaaagatgatgccacagagaaagacctttctgatctggtgtcagagatggagatgatgaagatgattgggaaacacaagaatatcataaatcttcttggagcctgcacacaggatgggcctctctatgtcatagttgagtatgcctctaaaggcaacctccgagaatacctccgagcccggaggccacccgggatggagtactcctatgacattaaccgtgttcctgaggagcagatgaccttcaaggacttggtgtcatgcacctaccagctggccagaggcatggagtacttggcttcccaaaaatgtattcatcgagatttagcagccagaaatgttttggtaacagaaaacaatgtgatgaaaatagcagactttggactcgccagagatatcaacaatatagactattacaaaaagaccaccaatgggcggcttccagtcaagtggatggctccagaagccctgtttgatagagtatacactcatcagagtgatgtctggtccttcggggtgttaatgtgggagatcttcactttagggggctcgccctacccagggattcccgtggaggaactttttaagctgctgaaggaaggacacagaatggataagccagccaactgcaccaacgaactgtacatgatgatgagggactgttggcatgcagtgccctcccagagaccaacgttcaagcagttggtagaagacttggatcgaattctcactctcacaaccaatgaggaatacttggacctcagccaacctctcgaacagtattcacctagttaccctgacacaagaagttcttgttcttcaggagatgattctgttttttctccagaccccatgccttacgaaccatgccttcctcagtatccacacataaacggcagtgttaaaacatgaatgactgtgtctgcctgtccccaaacaggacagcactgggaacctagctacactgagcagggagaccatgcctcccagagcttgttgtctccacttgtatatatggatcagaggagtaaataattggaaaagtaatcagcatatgtgtaaagatttatacagttgaaaacttgtaatcttccccaggaggagaagaaggtttctggagcagtggactgccacaagccaccatgtaacccctctcacctgccgtgcgtactggctgtggaccagtaggactcaaggtggacgtgcgttctgccttccttgttaattttgtaataattggagaagatttatgtcagcacacacttacagagcacaaatgcagtatataggtgctggatgtatgtaaatatattcaaattatgtataaatatatattatatatttacaaggagttattttttgtattgattttaaatggatgtcccaatgcacctagaaaattggtctctctttttttaatagctatttgctaaatgctgttcttacacataatttcttaattttcaccgagcagaggtggaaaaatacttttgctttcagggaaaatggtataacgttaatttattaataaattggtaatatacaaaacaattaatcatttatagttttttttgtaatttaagtggcatttctatgcaggcagcacagcagactagttaatctattgcttggacttaactagttatcagatcctttgaaaagagaatatttacaatatatgactaatttggggaaaatgaagttttgatttatttgtgtttaaatgctgctgtcagacgattgttcttagacctcctaaatgccccatattaaaagaactcattcataggaaggtgtttcattttggtgtgcaaccctgtcattacgtcaacgcaacgtctaactggacttcccaagataaatggtaccagcgtcctcttaaaagatgccttaatccattccttgaggacagaccttagttgaaatgatagcagaatgtgcttctctctggcagctggccttctgcttctgagttgcacattaatcagattagcctgattctcttcagtgaattttgataatggcttccagactctttgcgttggagacgcctgttaggatcttcaagtcccatcatagaaaattgaaacacagagttgttctgctgatagttttggggatacgtccatctttttaagggattgctttcatctaattctggcaggacctcaccaaaagatccagcctcatacctacatcagacaaaatatcgccgttgttccttctgtactaaagtattgtgttttgctttggaaacacccactcactttgcaatagccgtgcaagatgaatgcagattacactgatcttatgtgttacaaaattggagaaagtatttaataaaacctgttaatttttatactgacaataaaaatgtttctacagatattaatgttaacaagacaaaataaatgtcacgcaactt

SEQ ID NO: 43 - DNA, 3216 bp, Homo sapiens
  fibroblast growth factor receptor 2 transcript variant 6 (1)..(3216): LocusID: 2263; NM_022973
gagcgggcgagggagcgcgcgcggccgccacaaagctcgggcgccgcggggctgcatgcggcgtacctggcccggcgcggcgactgctctccgggctggcgggggccggccgcgagccccgggggccccgaggccgcagcttgcctgcgcgctctgagccttcgcaactcgcgagcaaagtttggtggaggcaacgccaagcctgagtcctttcttcctctcgttccccaaatccgagggcagcccgcgggcgtcatgcccgcgctcctccgcagcctggggtacgcgctgaagcccgggaggcttggcgccggcgaagacccaaggaccactcttctgcgtttggagttgctccccacaaccccgggctcgtcgctttctccatcccgacccagccggggcgcggggacaacacaggtcgcggaggagcgttgccattcaagtgactgcagcagcagcggcagcgcctcggttcctgagcccaccgcaggctgaaggcattgcgcgtagtccatgcccgtagaggaagtgtgcagatgggattaacgtccacatggagatatggaagaggaccggggattggtaccgtaaccatggtcagctggggtcgtttcatctgcctggtcgtggtcaccatggcaaccttgtccctggcccggccctccttcagtttagttgaggataccacattagagccagaagagccaccaaccaaataccaaatctctcaaccagaagtgtacgtggctgcgccaggggagtcgctagaggtgcgctgcctgttgaaagatgccgccgtgatcagttggactaaggatggggtgcacttggggcccaacaataggacagtgcttattggggagtacttgcagataaagggcgccacgcctagagactccggcctctatgcttgtactgccagtaggactgtagacagtgaaacttggtacttcatggtgaatgtcacagatgccatctcatccggagatgatgaggatgacaccgatggtgcggaagattttgtcagtgagaacagtaacaacaagagagcaccatactggaccaacacagaaaagatggaaaagcggctccatgctgtgcctgcggccaacactgtcaagtttcgctgcccagccggggggaacccaatgccaaccatgcggtggctgaaaaacgggaaggagtttaagcaggagcatcgcattggaggctacaaggtacgaaaccagcactggagcctcattatggaaagtgtggtcccatctgacaagggaaattatacctgtgtggtggagaatgaatacgggtccatcaatcacacgtaccacctggatgttgtggagcgatcgcctcaccggcccatcctccaagccggactgccggcaaatgcctccacagtggtcggaggagacgtagagtttgtctgcaaggtttacagtgatgcccagccccacatccagtggatcaagcacgtggaaaagaacggcagtaaatacgggcccgacgggctgccctacctcaaggttctcaaggccgccggtgttaacaccacggacaaagagattgaggttctctatattcggaatgtaacttttgaggacgctggggaatatacgtgcttggcgggtaattctattgggatatcctttcactctgcatggttgacagttctgccagcgcctggaagagaaaaggagattacagcttccccagactacctggagatagccatttactgcataggggtcttcttaatcgcctgtatggtggtaacagtcatcctgtgccgaatgaagaacacgaccaagaagccagacttcagcagccagccggctgtgcacaagctgaccaaacgtatccccctgcggagacaggtaacagtttcggctgagtccagctcctccatgaactccaacaccccgctggtgaggataacaacacgcctctcttcaacggcagacacccccatgctggcaggggtctccgagtatgaacttccagaggacccaaaatgggagtttccaagagataagctgacactgggcaagcccctgggagaaggttgctttgggcaagtggtcatggcggaagcagtgggaattgacaaagacaagcccaaggaggcggtcaccgtggccgtgaagatgttgaaagatgatgccacagagaaagacctttctgatctggtgtcagagatggagatgatgaagatgattgggaaacacaagaatatcataaatcttcttggagcctgcacacaggatgggcctctctatgtcatagttgagtatgcctctaaaggcaacctccgagaatacctccgagcccggaggccacccgggatggagtactcctatgacattaaccgtgttcctgaggagcagatgaccttcaaggacttggtgtcatgcacctaccagctggccagaggcatggagtacttggcttcccaaaaatgtattcatcgagatttagcagccagaaatgttttggtaacagaaaacaatgtgatgaaaatagcagactttggactcgccagagatatcaacaatatagactattacaaaaagaccaccaatgggcggcttccagtcaagtggatggctccagaagccctgtttgatagagtatacactcatcagagtgatgtctggtccttcggggtgttaatgtgggagatcttcactttagggggctcgccctacccagggattcccgtggaggaactttttaagctgctgaaggaaggacacagaatggataagccagccaactgcaccaacgaactgtacatgatgatgagggactgttggcatgcagtgccctcccagagaccaacgttcaagcagttggtagaagacttggatcgaattctcactctcacaaccaatgagatctgaaagtttatggcttcattgagaaactgggaaaagttggtcaggcgcagtggctcatgcctgtaatcccagcactttgggaggccgaggcaggcggatcatgaggtcaggagttccagaccagcctggccaacatggtgaaaccctgtctctactaaagatacaaaaaattagccgggcgtgttggtgtgcgcctgtaatcccagctactccgggaggctgaggcaggagagtcacttgaaccggggaggcggaggttacagtgagccgagatcatgccattgcattccagccttggcgacagagcgagactccatct

SEQ ID NO: 44 - DNA, 3219 bp, Homo sapiens
  fibroblast growth factor receptor 2 transcript variant 7 (1)..(3219): LocusID: 2263; NM_022974
gagcgggcgagggagcgcgcgcggccgccacaaagctcgggcgccgcggggctgcatgcggcgtacctggcccggcgcggcgactgctctccgggctggcgggggccggccgcgagccccgggggccccgaggccgcagcttgcctgcgcgctctgagccttcgcaactcgcgagcaaagtttggtggaggcaacgccaagcctgagtcctttcttcctctcgttccccaaatccgagggcagcccgcgggcgtcatgcccgcgctcctccgcagcctggggtacgcgctgaagcccgggaggcttggcgccggcgaagacccaaggaccactcttctgcgtttggagttgctccccacaaccccgggctcgtcgctttctccatcccgacccagccggggcgcggggacaacacaggtcgcggaggagcgttgccattcaagtgactgcagcagcagcggcagcgcctcggttcctgagcccaccgcaggctgaaggcattgcgcgtagtccatgcccgtagaggaagtgtgcagatgggattaacgtccacatggagatatggaagaggaccggggattggtaccgtaaccatggtcagctggggtcgtttcatctgcctggtcgtggtcaccatggcaaccttgtccctggcccggccctccttcagtttagttgaggataccacattagagccagaagagccaccaaccaaataccaaatctctcaaccagaagtgtacgtggctgcgccaggggagtcgctagaggtgcgctgcctgttgaaagatgccgccgtgatcagttggactaaggatggggtgcacttggggcccaacaataggacagtgcttattggggagtacttgcagataaagggcgccacgcctagagactccggcctctatgcttgtactgccagtaggactgtagacagtgaaacttggtacttcatggtgaatgtcacagatgccatctcatccggagatgatgaggatgacaccgatggtgcggaagattttgtcagtgagaacagtaacaacaagagagcaccatactggaccaacacagaaaagatggaaaagcggctccatgctgtgcctgcggccaacactgtcaagtttcgctgcccagccggggggaacccaatgccaaccatgcggtggctgaaaaacgggaaggagtttaagcaggagcatcgcattggaggctacaaggtacgaaaccagcactggagcctcattatggaaagtgtggtcccatctgacaagggaaattatacctgtgtggtggagaatgaatacgggtccatcaatcacacgtaccacctggatgttgtggagcgatcgcctcaccggcccatcctccaagccggactgccggcaaatgcctccacagtggtcggaggagacgtagagtttgtctgcaaggtttacagtgatgcccagccccacatccagtggatcaagcacgtggaaaagaacggcagtaaatacgggcccgacgggctgccctacctcaaggttctcaagcactcggggataaatagttccaatgcagaagtgctggctctgttcaatgtgaccgaggcggatgcgggggaatatatatgtaaggtctccaattatatagggcaggccaaccagtctgcctggctcactgtcctgccaaaacagcaagcgcctggaagagaaaaggagattacagcttccccagactacctggagatagccatttactgcataggggtcttcttaatcgcctgtatggtggtaacagtcatcctgtgccgaatgaagaacacgaccaagaagccagacttcagcagccagccggctgtgcacaagctgaccaaacgtatccccctgcggagacaggtaacagtttcggctgagtccagctcctccatgaactccaacaccccgctggtgaggataacaacacgcctctcttcaacggcagacacccccatgctggcaggggtctccgagtatgaacttccagaggacccaaaatgggagtttccaagagataagctgacactgggcaagcccctgggagaaggttgctttgggcaagtggtcatggcggaagcagtgggaattgacaaagacaagcccaaggaggcggtcaccgtggccgtgaagatgttgaaagatgatgccacagagaaagacctttctgatctggtgtcagagatggagatgatgaagatgattgggaaacacaagaatatcataaatcttcttggagcctgcacacaggatgggcctctctatgtcatagttgagtatgcctctaaaggcaacctccgagaatacctccgagcccggaggccacccgggatggagtactcctatgacattaaccgtgttcctgaggagcagatgaccttcaaggacttggtgtcatgcacctaccagctggccagaggcatggagtacttggcttcccaaaaatgtattcatcgagatttagcagccagaaatgttttggtaacagaaaacaatgtgatgaaaatagcagactttggactcgccagagatatcaacaatatagactattacaaaaagaccaccaatgggcggcttccagtcaagtggatggctccagaagccctgtttgatagagtatacactcatcagagtgatgtctggtccttcggggtgttaatgtgggagatcttcactttagggggctcgccctacccagggattcccgtggaggaactttttaagctgctgaaggaaggacacagaatggataagccagccaactgcaccaacgaactgtacatgatgatgagggactgttggcatgcagtgccctcccagagaccaacgttcaagcagttggtagaagacttggatcgaattctcactctcacaaccaatgagatctgaaagtttatggcttcattgagaaactgggaaaagttggtcaggcgcagtggctcatgcctgtaatcccagcactttgggaggccgaggcaggcggatcatgaggtcaggagttccagaccagcctggccaacatggtgaaaccctgtctctactaaagatacaaaaaattagccgggcgtgttggtgtgcgcctgtaatcccagctactccgggaggctgaggcaggagagtcacttgaaccggggaggcggaggttacagtgagccgagatcatgccattgcattccagccttggcgacagagcgagactccatct

SEQ ID NO: 45 - DNA, 4310 bp, Homo sapiens
  fibroblast growth factor receptor 2 transcript variant 8 (1)..(4310): LocusID: 2263; NM_022975
gagcgggcgagggagcgcgcgcggccgccacaaagctcgggcgccgcggggctgcatgcggcgtacctggcccggcgcggcgactgctctccgggctggcgggggccggccgcgagccccgggggccccgaggccgcagcttgcctgcgcgctctgagccttcgcaactcgcgagcaaagtttggtggaggcaacgccaagcctgagtcctttcttcctctcgttccccaaatccgagggcagcccgcgggcgtcatgcccgcgctcctccgcagcctggggtacgcgtgaagcccgggaggcttggcgccggcgaagacccaaggaccactcttctgcgtttggagttgctccccacaaccccgggctcgtcgctttctccatcccgacccacgcggggcgcggggacaacacaggtcgcggaggagcgttgccattcaagtgactgcagcagcagcggcagcgcctcggttcctgagcccaccgcaggctgaaggcattgcgcgtagtccatgcccgtagaggaagtgtgcagatgggattaacgtccacatggagatatggaagaggaccggggattggtaccgtaaccatggtcagctggggtcgtttcatctgcctggtcgtggtcaccatggcaaccttgtccctggcccggccctccttcagtttagttgaggataccacattagagccagaagatgccatctcatccggagatgatgaggatgacaccgatggtgcggaagattttgtcagtgagaacagtaacaacaagagagcaccatactggaccaacacagaaaagatggaaaagcggctccatgctgtgcctgcggccaacactgtcaagtttcgctgcccagccggggggaacccaatgccaaccatgcggtggctgaaaaacgggaaggagtttaagcaggagcatcgcattggaggctacaaggtacgaaaccagcactggagcctcattatggaaagtgtggtcccatctgacaagggaaattatacctgtgtggtggagaatgaatacgggtccatcaatcacacgtaccacctggatgttgtggagcgatcgcctcaccggcccatcctccaagccggactgccggcaaatgcctccacagtggtcggaggagacgtagagtttgtctgcaaggtttacagtgatgcccagccccacatccagtggatcaagcacgtggaaaagaacggcagtaaatacgggcccgacgggctgccctacctcaaggttctcaagcactcggggataaatagttccaatgcagaagtgctggctctgttcaatgtgaccgaggcggatgctggggaatatatatgtaaggtctccaattatatagggcaggccaaccagtctgcctggctcactgtcctgccaaaacagcaagcgcctggaagagaaaaggagattacagcttccccagactacctggagatagccatttactgcataggggtcttcttaatcgcctgtatggtggtaacagtcatcctgtgccgaatgaagaacacgaccaagaagccagacttcagcagccagccggctgtgcacaagctgaccaaacgtatccccctgcggagacaggtttcggctgagtccagctcctccatgaactccaacaccccgctggtgaggataacaacacgcctctcttcaacggcagacacccccatgctggcaggggtctccgagtatgaacttccagaggacccaaaatgggagtttccaagagataagctgacactgggcaagcccctgggagaaggttgctttgggcaagtggtcatggcggaagcagtgggaattgacaaagacaagcccaaggaggcggtcaccgtggccgtgaagatgttgaaagatgatgccacagagaaagacctttctgatctggtgtcagagatggagatgatgaagatgattgggaaacacaagaatatcataaatcttcttggagcctgcacacaggatgggcctctctatgtcatagttgagtatgcctctaaaggcaacctccgagaatacctccgagcccggaggccacccgggatggagtactcctatgacattaaccgtgttcctgaggagcagatgaccttcaaggacttggtgtcatgcacctaccagctggccagaggcatggagtacttggcttcccaaaaatgtattcatcgagatttagcagccagaaatgttttggtaacagaaaacaatgtgatgaaaatagcagactttggactcgccagagatatcaacaatatagactattacaaaaagaccaccaatgggcggcttccagtcaagtggatggctccagaagccctgtttgatagagtatacactcatcagagtgatgtctggtccttcggggtgttaatgtgggagatcttcactttagggggctcgccctacccagggattcccgtggaggaactttttaagctgctgaaggaaggacacagaatggataagccagccaactgcaccaacgaactgtacatgatgatgagggactgttggcatgcagtgccctcccagagaccaacgttcaagcagttggtagaagacttggatcgaattctcactctcacaaccaatgaggaatacttggacctcagccaacctctcgaacagtattcacctagttaccctgacacaagaagttcttgttcttcaggagatgattctgttttttctccagaccccatgccttacgaaccatgccttcctcagtatccacacataaacggcagtgttaaaacatgaatgactgtgtctgcctgtccccaaacaggacagcactgggaacctagctacactgagcagggagaccatgcctcccagagcttgttgtctccacttgtatatatggatcagaggagtaaataattggaaaagtaatcagcatatgtgtaaagatttatacagttgaaaacttgtaatcttccccaggaggagaagaaggtttctggagcagtggactgccacaagccaccatgtaacccctctcacctgccgtgcgtactggctgtggaccagtaggactcaaggtggacgtgcgttctgccttccttgttaattttgtaataattggagaagatttatgtcagcacacacttacagagcacaaatgcagtatataggtgctggatgtatgtaaatatattcaaattatgtataaatatatattatatatttacaaggagttattttttgtattgattttaaatggatgtcccaatgcacctagaaaattggtctctctttttttaatagctatttgctaaatgctgttcttacacataatttcttaattttcaccgagcagaggtggaaaaatacttttgctttcagggaaaatggtataacgttaatttattaataaattggtaatatacaaaacaattaatcatttatagttttttttgtaatttaagtggcatttctatgcaggcagcacagcagactagttaatctattgcttggacttaactagttatcagatcctttgaaaagagaatatttacaatatatgactaatttggggaaaatgaagttttgatttatttgtgtttaaatgctgctgtcagacgattgttcttagacctcctaaatgccccatattaaaagaactcattcataggaaggtgtttcattttggtgtgcaaccctgtcattacgtcaacgcaacgtctaactggacttcccaagataaatggtaccagcgtcctcttaaaagatgccttaatccattccttgaggacagaccttagttgaaatgatagcagaatgtgcttctctctggcagctggccttctgcttctgagttgcacattaatcagattagcctgtattctcttcagtgaattttgataatggcttccagactctttggcgttggagacgcctgttaggatcttcaagtcccatcatagaaaattgaaacacagagttgttctgctgatagttttggggatacgtccatctttttaagggattgctttcatctaattctggcaggacctcaccaaaagatccagcctcatacctacatcagacaaaatatcgccgttgttccttctgtactaaagtattgtgttttgctttggaaacacccactcactttgcaatagccgtgcaagatgaatgcagattacactgatcttatgtgttacaaaattggagaaagtatttaataaaacctgttaatttttatactgacaataaaaatgtttctacagatattaatgttaacaagacaaaataaatgtcacgcaacttaaaaaaa

SEQ ID NO: 46 - DNA, 1807 bp, Homo sapiens
  fibroblast growth factor receptor 2 transcript variant 9 (1)..(1807): LocusID: 2263; NM_022976
gagcgggcgagggagcgcgcgcggccgccacaaagctcgggcgccgcggggctgcatgcggcgtacctggcccggcgcggcgactgctctccgggctggcgggggccggccgcgagccccgggggccccgaggccgcagcttgcctgcgcgctctgagccttcgcaactcgcgagcaaagtttggtggaggcaacgccaagcctgagtcctttcttcctctcgttccccaaatccgagggcagcccgcgggcgtcatgcccgcgctcctccgcagcctggggtacgcgctgaagcccgggaggcttggcgccggcgaagacccaaggaccactcttctgcgtttggagttgctccccgcaaccccgggctcgtcgctttctccatcccgacccacgcggggccggggacaacacaggtcgcggaggagcgttgccattcaagtgactgcagcagcagcgcagcgcctcggttcctgagcccaccgcagctgaaggcattgcgcgtagtccatgcccgtagaggaagtgtgcagatgggattaacgtccacatggagatatggaagaggaccggggattggtaccgtaaccatggtcagctggggtcgtttcatctgcctggtcgtggtcaccatggcaaccttgtccctggcccggccctccttcagtttagttgaggataccacattagagccagaagagccaccaaccaaataccaaatctctcaaccagaagtgtacgtggctgcgccaggggagtcgctagaggtgcgctgcctgttgaaagatgccgccgtgatcagttggactaaggatggggtgcacttggggcccaacaataggacagtgcttattggggagtacttgcagataaagggcgccacacctagagactccggcctctatgcttgtactgccagtaggactgtagacagtgaaacttggtacttcatggtgaatgtcacagatgccatctcatccggagatgatgaggatgacaccgatggtgcggaagattttgtcagtgagaacagtaacaacaagagagcaccatactggaccaacacagaaaagatggaaaagcggctccatgctgtgcctgcggccaacactgtcaagtttcgctgcccagccggggggaacccaatgccaaccatgcggtggctgaaaaacgggaaggagtttaagcaggagcatcgcattggaggctacaaggtacgaaaccagcactggagcctcattatggaaagtgtggtcccatctgacaagggaaattatacctgtgtagtggagaatgaatacgggtccatcaatcacacgtaccacctggatgttgtggagcgatcgcctcaccggcccatcctccaagccggactgccggcaaatgcctccacagtggtcggaggagacgtagagtttgtctgcaaggtttacagtgatgcccagccccacatccagtggatcaagcacgtggaaaagaacggcagtaaatacgggcccgacgggctgccctacctcaaggttctcaagcactcggggataaatagttccaatgcagaagtgctggctctgttcaatgtgaccgaggcggatgctggggaatatatatgtaaggtctccaattatatagggcaggccaaccagtctgcctggctcactgtcctgccaaaacagcaaggccgccggtgttaacaccacggacaaagagattgaggttctctatattcggaatgtaacttttgaggacgctggggaatatacgtgcttggcgggtaattctattgggatatcctttcactctgcatggt

SEQ ID NO: 47 - DNA, 4667 bp, Homo sapiens
  fibroblast growth factor receptor 2 transcript variant 10 (1)..(4667): LocusID: 2263; NM_023028
gagcgggcgagggagcgcgcgcggccgccacaaagctcgggcgccgcggggctgcatgcggcgtacctggcccggcgcggcgactgctctccgggctggcgggggccggccgcgagccccgggggccccgaggccgcagcttgcctgcgcgctctgagccttcgcaactcgcgagcaaagtttggtggaggcaacgccaagcctgagtcctttcttcctctcgttccccaaatccgagggcagcccgcgggcgtcatgcccgcgctcctccgcagcctggggtacgcgctgaagcccgggaggcttggcgccggcgaagacccaaggaccactcttctgcgtttggagttgctccccacaaccccgggctcgtcgctttctccatcccgacccagccggggcgcggggacaacacaggtcgcggaggagcgttgccattcaagtgactgcagcagcagcggcagcgcctcggttcctgagcccaccgcaggctgaaggcattgcgcgtagtccatgcccgtagaggaagtgtgcagatgggattaacgtccacatggagatatggaagaggaccggggattggtaccgtaaccatggtcagctggggtcgtttcatctgcctggtcgtggtcaccatggcaaccttgtccctggcccggccctccttcagtttagttgaggataccacattagagccagaagagccaccaaccaaataccaaatctctcaaccagaagtgtacgtggctgcgccaggggagtcgctagaggtgcgctgcctgttgaaagatgccgccgtgatcagttggactaaggatggggtgcacttggggcccaacaataggacagtgcttattggggagtacttgcagataaagggcgccacgcctagagactccggcctctatgcttgtactgccagtaggactgtagacagtgaaacttggtacttcatggtgaatgtcacagatgccatctcatccggagatgatgaggatgacaccgatggtgcggaagattttgtcagtgagaacagtaacaacaagagagcaccatactggaccaacacagaaaagatggaaaagcggctccatgctgtgcctgcggccaacactgtcaagtttcgctgcccagccggggggaacccaatgccaaccatgcggtggctgaaaaacgggaaggagtttaagcaggagcatcgcattggaggctacaaggtacgaaaccagcactggagcctcattatggaaagtgtggtcccatctgacaagggaaattatacctgtgtggtggagaatgaatacgggtccatcaatcacacgtaccacctggatgttgtggagcgatcgcctcaccggcccatcctccaagccggactgccggcaaatgcctccacagtggtcggaggagacgtagagtttgtctgcaaggtttacagtgatgcccagccccacatccagtggatcaagcacgtggaaaagaacggcagtaaatacgggcccgacgggctgccctacctcaaggttctcaaggttctcaaggccgccggtgttaacaccacggacaaagagattgaggttctctatattcggaatgtaacttttgaggacgctggggaatatacgtgcttggcgggtaattctattgggatatcctttcactctgcatggttgacagttctgccagcgcctggaagagaaaaggagattacagcttccccagactacctggagatagccatttactgcataggggtcttcttaatcgcctgtatggtggtaacagtcatcctgtgccgaatgaagaacacgaccaagaagccagacttcagcagccagccggctgtgcacaagctgaccaaacgtatccccctgcggagacaggtttcggctgagtccagctcctccatgaactccaacaccccgctggtgaggataacaacacgcctctcttcaacggcagacacccccatgctggcaggggtctccgagtatgaacttccagaggacccaaaatgggagtttccaagagataagctgacactgggcaagcccctgggagaaggttgctttgggcaagtggtcatggcggaagcagtgggaattgacaaagacaagcccaaggaggcggtcaccgtggccgtgaagatgttgaaagatgatgccacagagaaagacctttctgatctggtgtcagagatggagatgatgaagatgattgggaaacacaagaatatcataaatcttcttggagcctgcacacaggatgggcctctctatgtcatagttgagtatgcctctaaaggcaacctccgagaatacctccgagcccggaggccacccgggatggagtactcctatgacattaaccgtgttcctgaggagcagatgaccttcaaggacttggtgtcatgcacctaccagctggccagaggcatggagtacttggcttcccaaaaatgtattcatcgagatttagcagccagaaatgttttggtaacagaaaacaatgtgatgaaaatagcagactttggactcgccagagatatcaacaatatagactattacaaaaagaccaccaatgggcggcttccagtcaagtggatggctccagaagccctgtttgatagagtatacactcatcagagtgatgtctggtccttcggggtgttaatgtgggagatcttcactttagggggctcgccctacccagggattcccgtggaggaactttttaagctgctgaaggaaggacacagaatggataagccagccaactgcaccaacgaactgtacatgatgatgagggactgttggcatgcagtgccctcccagagaccaacgttcaagcagttggtagaagacttggatcgaattctcactctcacaaccaatgaggaatacttggacctcagtcagcctctcgaaccgtattcaccttgttatcctgacccaagatgaaataaaacgtctctcttcccttctttcaggaatacttggacctcagccaacctctcgaacagtattcacctagttaccctgacacaagaagttcttgttcttcaggagatgattctgttttttctccagaccccatgccttacgaaccatgccttcctcagtatccacacataaacggcagtgttaaaacatgaatgactgtgtctgcctgtccccaaacaggacagcactgggaacctagctacactgagcagggagaccatgcctcccagagcttgttgtctccacttgtatatatggatcagaggagtaaataattggaaaagtaatcagcatatgtgtaaagatttatacagttgaaaacttgtaatcttccccaggaggagaagaaggtttctggagcagtggactgccacaagccaccatgtaacccctctcacctgccgtgcgttctggctgtggaccagtaggactcaaggtggacgtgcgttctgccttccttgttaattttgtaataattggagaagatttatgtcagcacacacttacagagcacaaatgcagtatataggtgctggatgtatgtaaatatattcaaattatgtataaatatatattatatatttacaaggagttattttttgtattgattttaaatggatgtcccaatgcacctagaaaattggtctctctttttttaatagctatttgctaaatgctgttcttacacataatttcttaattttcaccgagcagaggtggaaaaatacttttgctttcagggaaaatggtataacgttaatttattaataaattggtaatatacaaaacaattaatcatttatagttttttttgtaatttaagtggcatttctatgcaggcagcacagcagactagttaatctattgcttggacttaactagttatcagatcctttgaaaagagaatatttacaatatatgactaatttggggaaaatgaagttttgatttatttgtgtttaaatgctgctgtcagacgattgttcttagacctcctaaatgccccatattaaaagaactcattcataggaaggtgtttcattttggtgtgcaaccctgtcattacgtcaacgcaacgtctaactggacttcccaagataaatggtaccagcgtcctcttaaaagatgccttaatccattccttgaggacagaccttagttgaaatgatagcagaatgtgcttctctctggcagctggccttctgcttctgagttgcacattaatcagattagcctgattctcttcagtgaattttgataatggcttccagactctttgcgttggagacgcctgttaggatcttcaagtcccatcatagaaaattgaaacacagagttgttctgctgatagttttggggatacgtccatctttttaagggattgctttcatctaattctggcaggacctcaccaaaagatccagcctcatacctacatcagacaaaatatcgccgttgttccttctgtactaaagtattgtgttttgctttggaaacacccactcactttgcaatagccgtgcaagatgaatgcagattacactgatcttatgtgttacaaaattggagaaagtatttaataaaacctgttaatttttatactgacaataaaaatgtttctacagatattaatgttaacaagacaaaataaatgtcacgcaactt

SEQ ID NO: 48 - DNA, 4305 bp, Homo sapiens
  fibroblast growth factor receptor 2 transcript variant 11 (1)..(4305): LocusID: 2263; NM_023029
gagcgggcgagggagcgcgcgcggccgccacaaagctcgggcgccgcggggctgcatgcggcgtacctggcccggcgcggcgactgctctccgggctggcgggggccggccgcgagccccgggggccccgaggccgcagcttgcctgcgcgctctgagccttcgcaactcgcgagcaaagtttggtggaggcaacgccaagcctgagtcctttcttcctctcgttccccaaatccgagggcagcccgcgggcgtcatgcccgcgctcctccgcagcctggggtacgcgctgaagcccgggaggcttggcgccggcgaagacccaaggaccactcttctgcgtttggagttgctccccacaaccccgggctcgtcgctttctccatcccgacccacgcggggcgcggggacaacacaggtcgcggaggagcgttgccattcaagtgactgcagcagcagcggcagcgcctcggttcctgagcccaccgcaggctgaaggcattgcgcgtagtccatgcccgtagaggaagtgtgcagatgggattaacgtccacatggagatatggaagaggaccggggattggtaccgtaaccatggtcagctggggtcgtttcatctgcctggtcgtggtcaccatggcaaccttgtccctggcccggccctccttcagtttagttgaggataccacattagagccagaagatgccatctcatccggagatgatgaggatgacaccgatggtgcggaagattttgtcagtgagaacagtaacaacaagagagcaccatactggaccaacacagaaaagatggaaaagcggctccatgctgtgcctgcggccaacactgtcaagtttcgctgcccagccggggggaacccaatgccaaccatgcggtggctgaaaaacgggaaggagtttaagcaggagcatcgcattggaggctacaaggtacgaaaccagcactggagcctcattatggaaagtgtggtcccatctgacaagggaaattatacctgtgtggtggagaatgaatacgggtccatcaatcacacgtaccacctggatgttgtggagcgatcgcctcaccggcccatcctccaagccggactgccggcaaatgcctccacagtggtcggaggagacgtagagtttgtctgcaaggtttacagtgatgcccagccccacatccagtggatcaagcacgtggaaaagaacggcagtaaatacgggcccgacgggctgccctacctcaaggttctcaaggccgccggtgttaacaccacggacaaagagattgaggttctctatattcggaatgtaacttttgaggacgctggggaatatacgtgcttggcgggtaattctattgggatatcctttcactctgcatggttgacagttctgccagcgcctggaagagaaaaggagattacagcttccccagactacctggagatagccatttactgcataggggtcttcttaatcgcctgtatggtggtaacagtcatcctgtgccgaatgaagaacacgaccaagaagccagacttcagcagccagccggctgtgcacaagctgaccaaacgtatccccctgcggagacaggtaacagtttcggctgagtccagctcctccatgaactccaacaccccgctggtgaggataacaacacgcctctcttcaacggcagacacccccatgctggcaggggtctccgagtatgaacttccagaggacccaaaatgggagtttccaagagataagctgacactgggcaagcccctgggagaaggttgctttgggcaagtggtcatggcggaagcagtgggaattgacaaagacaagcccaaggaggcggtcaccgtggccgtgaagatgttgaaagatgatgccacagagaaagacctttctgatctggtgtcagagatggagatgatgaagatgattgggaaacacaagaatatcataaatcttcttggagcctgcacacaggatgggcctctctatgtcatagttgagtatgcctctaaaggcaacctccgagaatacctccgagcccggaggccacccgggatggagtactcctatgacattaaccgtgttcctgaggagcagatgaccttcaaggacttggtgtcatgcacctaccagctggccagaggcatggagtacttggcttcccaaaaatgtattcatcgagatttagcagccagaaatgttttggtaacagaaaacaatgtgatgaaaatagcagactttggactcgccagagatatcaacaatatagactattacaaaaagaccaccaatgggcggcttccagtcaagtggatggctccagaagccctgtttgatagagtatacactcatcagagtgatgtctggtccttcggggtgttaatgtgggagatcttcactttagggggctcgccctacccagggattcccgtggaggaactttttaagctgctgaaggaaggacacagaatggataagccagccaactgcaccaacgaactgtacatgatgatgagggactgttggcatgcagtgccctcccagagaccaacgttcaagcagttggtagaagacttggatcgaattctcactctcacaaccaatgaggaatacttggacctcagccaacctctcgaacagtattcacctagttaccctgacacaagaagttcttgttcttcaggagatgattctgttttttctccagaccccatgccttacgaaccatgccttcctcagtatccacacataaacggcagtgttaaaacatgaatgactgtgtctgcctgtccccaaacaggacagcactgggaacctagctacactgagcagggagaccatgcctcccagagcttgttgtctccacttgtatatatggatcagaggagtaaataattggaaaagtaatcagcatatgtgtaaagatttatacagttgaaaacttgtaatcttccccaggaggagaagaaggtttctggagcagtggactgccacaagccaccatgtaacccctctcacctgccgtgcgttctggctgtggaccagtaggactcaaggtggacgtgcgttctgccttccttgttaattttgtaataattggagaagatttatgtcagcacacacttacagagcacaaatgcagtatataggtgctggatgtatgtaaatatattcaaattatgtataaatatatattatatatttacaaggagttattttttgtattgattttaaatggatgtcccaatgcacctagaaaattggtctctctttttttaatagctatttgctaaatgctgttcttacacataatttcttaattttcaccgagcagaggtggaaaaatacttttgctttcagggaaaatggtataacgttaatttattaataaattggtaatatacaaaacaattaatcatttatagttttttttgtaatttaagtggcatttctatgcaggcagcacagcagactagttaatctattgcttggacttaactagttatcagatcctttgaaaagagaatatttacaatatatgactaatttggggaaaatgaagttttgatttatttgtgtttaaatgctgctgtcagacgattgttcttagacctcctaaatgccccatattaaaagaactcattcataggaaggtgtttcattttggtgtgcaaccctgtcattacgtcaacgcaacgtctaactggacttcccaagataaatggtaccagcgtcctcttaaaagatgccttaatccattccttgaggacagaccttagttgaaatgatagcagaatgtgcttctctctggcagctggccttctgcttctgagttgcacattaatcagattagcctgattctcttcagtgaattttgataatggcttccagactctttgcgttggagacgcctgttaggatcttcaagtcccatcatagaaaattgaaacacagagttgttctgctgatagttttggggatacgtccatctttttaagggattgctttcatctaattctggcaggacctcaccaaaagatccagcctcatacctacatcagacaaaatatcgccgttgttccttctgtactaaagtattgtgttttgctttggaaacacccactcactttgcaatagccgtgcaagatgaatgcagattacactgatcttatgtgttacaaaattggagaaagtatttaataaaacctgttaatttttatactgacaataaaaatgtttctacagatattaatgttaacaagacaaaataaatgtcacgcaactt

SEQ ID NO: 49 - DNA, 4222 bp, Homo sapiens
  fibroblast growth factor receptor 2 transcript variant 12 (1)..(4222): LocusID: 2263; NM_023030
gagcgggcgagggagcgcgcgcggccgccacaaagctcgggcgccgcggggctgcatgcggcgtacctggcccggcgcggcgactgctctccgggctggcgggggccggccgcgagccccgggggccccgaggccgcagcttgcctgcgcgctctgagccttcgcaactcgcgagcaaagtttggtggaggcaacgcaagcctgagtcctttcttcctctcgttccccaaatccgagggcagcccgcgggcgtcatggcgctcctccgcagcctggggtacgcgtgaagcccgggaggcttggcgccggcgaagacccaaggaccactcttctgcgtttggagttgctccccgcaaccccgggctcgtcgctttctccatcccgacccacgcggggccggggacaacacaggtcgcggaggagcgttgccattcaagtgactgcagcagcagcgcagcgcctcggttcctgagcccaccgcagctgaaggcattgcgcgtagtccatgcccgtagaggaagtgtgcagatgggattaacgtccacatggagatatggaagaggaccggggattggtaccgtaaccatggtcagctggggtcgtttcatctgcctggtcgtggtcaccatggcaaccttgtccctggcccggccctccttcagtttagttgaggataccacattagagccagaaggagcaccatactggaccaacacagaaaagatggaaaagcggctccatgctgtgcctgcggccaacactgtcaagtttcgctgcccagccggggggaacccaatgccaaccatgcggtggctgaaaaacgggaaggagtttaagcaggagcatcgcattggaggctacaaggtacgaaaccagcactggagcctcattatggaaagtgtggtcccatctgacaagggaaattatacctgtgtagtggagaatgaatacgggtccatcaatcacacgtaccacctggatgttgtggagcgatcgcctcaccggcccatcctccaagccggactgccggcaaatgcctccacagtggtcggaggagacgtagagtttgtctgcaaggtttacagtgatgcccagccccacatccagtggatcaagcacgtggaaaagaacggcagtaaatacgggcccgacgggctgccctacctcaaggttctcaagcactcggggataaatagttccaatgcagaagtgctggctctgttcaatgtgaccgaggcggatgctggggaatatatatgtaaggtctccaattatatagggcaggccaaccagtctgcctggctcactgtcctgccaaaacagcaagcgcctggaagagaaaaggagattacagcttccccagactacctggagatagccatttactgcataggggtcttcttaatcgcctgtatggtggtaacagtcatcctgtgccgaatgaagaacacgaccaagaagccagacttcagcagccagccggctgtgcacaagctgaccaaacgtatccccctgcggagacaggtaacagtttcggctgagtccagctcctccatgaactccaacaccccgctggtgaggataacaacacgcctctcttcaacggcagacacccccatgctggcaggggtctccgagtatgaacttccagaggacccaaaatgggagtttccaagagataagctgacactgggcaagcccctgggagaaggttgctttgggcaagtggtcatggcggaagcagtgggaattgacaaagacaagcccaaggaggcggtcaccgtggccgtgaagatgttgaaagatgatgccacagagaaagacctttctgatctggtgtcagagatggagatgatgaagatgattgggaaacacaagaatatcataaatcttcttggagcctgcacacaggatgggcctctctatgtcatagttgagtatgcctctaaaggcaacctccgagaatacctccgagcccggaggccacccgggatggagtactcctatgacattaaccgtgttcctgaggagcagatgaccttcaaggacttggtgtcatgcacctaccagctggccagacggatggagtacttggcttcccaaaaatgtattcatcgagatttagcagccagaaatgttttggtaacagaaaacaatgtgatgaaaatagcagactttggactcgccagagatatcaacaatatagactattacaaaaagaccaccaatgggcggcttccagtcaagtggatggctccagaagccctgtttgatagagtatacactcatcagagtgatgtctggtccttcggggtgttaatgtgggagatcttcactttagggggctcgccctacccagggattcccgtggaggaactttttaagctgctgaaggaaggacacagaatggataagccagccaactgcaccaacgaactgtacatgatgatgagggactgttggcatgcagtgccctcccagagaccaacgttcaagcagttggtagaagacttggatcgaattctcactctcacaaccaatgaggaatacttggacctcagccaacctctcgaacagtattcacctagttaccctgacacaagaagttcttgttcttcaggagatgattctgttttttctccagaccccatgccttacgaaccatgccttcctcagtatccacacataaacggcagtgttaaaacatgaatgactgtgtctgcctgtccccaaacaggacagcactgggaacctagctacactgagcagggagaccatgcctcccagagcttgttgtctccacttgtatatatggatcagaggagtaaataattggaaaagtaatcagcatatgtgtaaagatttatacagttgaaaacttgtaatcttccccaggaggagaagaaggtttctggagcagtggactgccacaagccaccatgtaacccctctcacctgccgtgcgttctggctgtggaccagtaggactcaaggtggacgtgcgttctgccttccttgttaattttgtaataattggagaagatttatgtcagcacacacttacagagcacaaatgcagtatataggtgctggatgtatgtaaatatattcaaattatgtataaatatatattatatatttacaaggagttattttttgtattgattttaaatggatgtcccaatgcacctagaaaattggtctctctttttttaatagctatttgctaaatgctgttcttacacataatttcttaattttcaccgagcagaggtggaaaaatacttttgctttcagggaaaatggtataacgttaatttattaataaattggtaatatacaaaacaattaatcatttatagttttttttgtaatttaagtggcatttctatgcaggcagcacagcagactagttaatctattgcttggacttaactagttatcagatcctttgaaaagagaatatttacaatatatgactaatttggggaaaatgaagttttgatttatttgtgtttaaatgctgctgtcagacgattgttcttagacctcctaaatgccccatattaaaagaactcattcataggaaggtgtttcattttggtgtgcaaccctgtcattacgtcaacgcaacgtctaactggacttcccaagataaatggtaccagcgtcctcttaaaagatgccttaatccattccttgaggacagaccttagttgaaatgatagcagaatgtgcttctctctggcagctggccttctgcttctgagttgcacattaatcagattagcctgattctcttcagtgaattttgataatggcttccagactctttgcgttggagacgcctgttaggatcttcaagtcccatcatagaaaattgaaacacagagttgttctgctgatagttttggggatacgtccatctttttaagggattgctttcatctaattctggcaggacctcaccaaaagatccagcctcatacctacatcagacaaaatatcgccgttgttccttctgtactaaagtattgtgttttgctttggaaacacccactcactttgcaatagccgtgcaagatgaatgcagattacactgatcttatgtgttacaaaattggagaaagtatttaataaaacctgttaatttttatactgacaataaaaatgtttctacagatattaatgttaacaagacaaaataaatgtcacgcaactt

SEQ ID NO: 50 - DNA, 4216 bp, Homo sapiens
  fibroblast growth factor receptor 2t ranscript variant 13 (1)..(4216): LocusID: 2263; NM_023031
gagcgggcgagggagcgcgcgcggccgccacaaagctcgggcgccgcggggctgcatgcggcgtacctggcccggcgcggcgactgctctccgggctggcgggggccggccgcgagccccgggggccccgaggccgcagcttgcctgcgcgctctgagccttcgcaactcgcgagcaaagtttggtggaggcaacgcaagcctgagtcctttcttcctctcgttccccaaatccgagggcagcccgcgggcgtcatggcgctcctccgcagcctggggtacgcgtgaagcccgggaggcttggcgccggcgaagacccaaggaccactcttctgcgtttggagttgctccccgcaaccccgggctcgtcgctttctccatcccgacccacgcggggccggggacaacacaggtcgcggaggagcgttgccattcaagtgactgcagcagcagcgcagcgcctcggttcctgagcccaccgcagctgaaggcattgcgcgtagtccatgcccgtagaggaagtgtgcagatgggattaacgtccacatggagatatggaagaggaccggggattggtaccgtaaccatggtcagctggggtcgtttcatctgcctggtcgtggtcaccatggcaaccttgtccctggcccggccctccttcagtttagttgaggataccacattagagccagaaggagcaccatactggaccaacacagaaaagatggaaaagcggctccatgctgtgcctgcggccaacactgtcaagtttcgctgcccagccggggggaacccaatgccaaccatgcggtggctgaaaaacgggaaggagtttaagcaggagcatcgcattggaggctacaaggtacgaaaccagcactggagcctcattatggaaagtgtggtcccatctgacaagggaaattatacctgtgtagtggagaatgaatacgggtccatcaatcacacgtaccacctggatgttgtggagcgatcgcctcaccggcccatcctccaagccggactgccggcaaatgcctccacagtggtcggaggagacgtagagtttgtctgcaaggtttacagtgatgcccagccccacatccagtggatcaagcacgtggaaaagaacggcagtaaatacgggcccgacgggctgccctacctcaaggttctcaagcactcggggataaatagttccaatgcagaagtgctggctctgttcaatgtgaccgaggcggatgctggggaatatatatgtaaggtctccaattatatagggcaggccaaccagtctgcctggctcactgtcctgccaaaacagcaagcgcctggaagagaaaaggagattacagcttccccagactacctggagatagccatttactgcataggggtcttcttaatcgcctgtatggtggtaacagtcatcctgtgccgaatgaagaacacgaccaagaagccagacttcagcagccagccggctgtgcacaagctgaccaaacgtatccccctgcggagacaggtttcggctgagtccagctcctccatgaactccaacaccccgctggtgaggataacaacacgcctctcttcaacggcagacacccccatgctggcaggggtctccgagtatgaacttccagaggacccaaaatgggagtttccaagagataagctgacactgggcaagcccctgggagaaggttgctttgggcaagtggtcatggcggaagcagtgggaattgacaaagacaagcccaaggaggcggtcaccgtggccgtgaagatgttgaaagatgatgccacagagaaagacctttctgatctggtgtcagagatggagatgatgaagatgattgggaaacacaagaatatcataaatcttcttggagcctgcacacaggatgggcctctctatgtcatagttgagtatgcctctaaaggcaacctccgagaatacctccgagcccggaggccacccgggatggagtactcctatgacattaaccgtgttcctgaggagcagatgaccttcaaggacttggtgtcatgcacctaccagctggccagacggatggagtacttggcttcccaaaaatgtattcatcgagatttagcagccagaaatgttttggtaacagaaaacaatgtgatgaaaatagcagactttggactcgccagagatatcaacaatatagactattacaaaaagaccaccaatgggcggcttccagtcaagtggatggctccagaagccctgtttgatagagtatacactcatcagagtgatgtctggtccttcggggtgttaatgtgggagatcttcactttagggggctcgccctacccagggattcccgtggaggaactttttaagctgctgaaggaaggacacagaatggataagccagccaactgcaccaacgaactgtacatgatgatgagggactgttggcatgcagtgccctcccagagaccaacgttcaagcagttggtagaagacttggatcgaattctcactctcacaaccaatgaggaatacttggacctcagccaacctctcgaacagtattcacctagttaccctgacacaagaagttcttgttcttcaggagatgattctgttttttctccagaccccatgccttacgaaccatgccttcctcagtatccacacataaacggcagtgttaaaacatgaatgactgtgtctgcctgtccccaaacaggacagcactgggaacctagctacactgagcagggagaccatgcctcccagagcttgttgtctccacttgtatatatggatcagaggagtaaataattggaaaagtaatcagcatatgtgtaaagatttatacagttgaaaacttgtaatcttccccaggaggagaagaaggtttctggagcagtggactgccacaagccaccatgtaacccctctcacctgccgtgcgttctggctgtggaccagtaggactcaaggtggacgtgcgttctgccttccttgttaattttgtaataattggagaagatttatgtcagcacacacttacagagcacaaatgcagtatataggtgctggatgtatgtaaatatattcaaattatgtataaatatatattatatatttacaaggagttattttttgtattgattttaaatggatgtcccaatgcacctagaaaattggtctctctttttttaatagctatttgctaaatgctgttcttacacataatttcttaattttcaccgagcagaggtggaaaaatacttttgctttcagggaaaatggtataacgttaatttattaataaattggtaatatacaaaacaattaatcatttatagttttttttgtaatttaagtggcatttctatgcaggcagcacagcagactagttaatctattgcttggacttaactagttatcagatcctttgaaaagagaatatttacaatatatgactaatttggggaaaatgaagttttgatttatttgtgtttaaatgctgctgtcagacgattgttcttagacctcctaaatgccccatattaaaagaactcattcataggaaggtgtttcattttggtgtgcaaccctgtcattacgtcaacgcaacgtctaactggacttcccaagataaatggtaccagcgtcctcttaaaagatgccttaatccattccttgaggacagaccttagttgaaatgatagcagaatgtgcttctctctggcagctggccttctgcttctgagttgcacattaatcagattagcctgattctcttcagtgaattttgataatggcttccagactctttgcgttggagacgcctgttaggatcttcaagtcccatcatagaaaattgaaacacagagttgttctgctgatagttttggggatacgtccatctttttaagggattgctttcatctaattctggcaggacctcaccaaaagatccagcctcatacctacatcagacaaaatatcgccgttgttccttctgtactaaagtattgtgttttgctttggaaacacccactcactttgcaatagccgtgcaagatgaatgcagattacactgatcttatgtgttacaaaattggagaaagtatttaataaaacctgttaatttttatactgacaataaaaatgtttctacagatattaatgttaacaagacaaaataaatgtcacgcaactt

SEQ ID NO: 51 - DNA, 3682 bp, Homo sapiens
  tumor necrosis factor receptor superfamily, member 1B (1)..(3682): LocusID: 7133; NM_001066
gcgagcgcagcggagcctggagagaaggcgctgggctgcgagggcgcgagggcgcgagggcagggggcaaccggaccccgcccgcacccatggcgcccgtcgccgtctgggccgcgctggccgtcggactggagctctgggctgcggcgcacgccttgcccgcccaggtggcatttacaccctacgccccggagcccgggagcacatgccggctcagagaatactatgaccagacagctcagatgtgctgcagcaaatgctcgccgggccaacatgcaaaagtcttctgtaccaagacctcggacaccgtgtgtgactcctgtgaggacagcacatacacccagctctggaactgggttcccgagtgcttgagctgtggctcccgctgtagctctgaccaggtggaaactcaagcctgcactcgggaacagaaccgcatctgcacctgcaggcccggctggtactgcgcgctgagcaagcaggaggggtgccggctgtgcgcgccgctgcgcaagtgccgcccgggcttcggcgtggccagaccaggaactgaaacatcagacgtggtgtgcaagccctgtgccccggggacgttctccaacacgacttcatccacggatatttgcaggccccaccagatctgtaacgtggtggccatccctgggaatgcaagcatggatgcagtctgcacgtccacgtcccccacccggagtatggccccaggggcagtacacttaccccagccagtgtccacacgatcccaacacacgcagccaactccagaacccagcactgctccaagcacctccttcctgctcccaatgggccccagccccccagctgaagggagcactggcgacttcgctcttccagttggactgattgtgggtgtgacagccttgggtctactaataataggagtggtgaactgtgtcatcatgacccaggtgaaaaagaagcccttgtgcctgcagagagaagccaaggtgcctcacttgcctgccgataaggcccggggtacacagggccccgagcagcagcacctgctgatcacagcgccgagctccagcagcagctccctggagagctcggccagtgcgttggacagaagggcgcccactcggaaccagccacaggcaccaggcgtggaggccagtggggccggggaggcccgggccagcaccgggagctcagattcttcccctggtggccatgggacccaggtcaatgtcacctgcatcgtgaacgtctgtagcagctctgaccacagctcacagtgctcctcccaagccagctccacaatgggagacacagattccagcccctcggagtccccgaaggacgagcaggtccccttctccaaggaggaatgtgcctttcggtcacagctggagacgccagagaccctgctggggagcaccgaagagaagcccctgccccttggagtgcctgatgctgggatgaagcccagttaaccaggccggtgtgggctgtgtcgtagccaaggtgggctgagccctggcaggatgaccctgcgaaggggccctggtccttccaggcccccaccactaggactctgaggctctttctgggccaagttcctctagtgccctccacagccgcagcctccctctgacctgcaggccaagagcagaggcagcgagttgtggaaagcctctgctgccatggcgtgtccctctcggaaggctggctgggcatggacgttcggggcatgctggggcaagtccctgactctctgtgacctgccccgcccagctgcacctgccagcctggcttctggagcccttgggttttttgtttgtttgtttgtttgtttgtttgtttctccccctgggctctgccccagctctggcttccagaaaaccccagcatccttttctgcagaggggctttctggagaggagggatgctgcctgagtcacccatgaagacaggacagtgcttcagcctgaggctgagactgcgggatggtcctggggctctgtgcagggaggaggtggcagccctgtagggaacggggtccttcaagttagctcaggaggcttggaaagcatcacctcaggccaggtgcagtggctcacgcctatgatcccagcactttgggaggctgaggcgggtggatcacctgaggttaggagttcgagaccagcctggccaacatggtaaaaccccatctctactaaaaatacagaaattagccgggcgtggtggcgggcacctatagtcccagctactcagaagcctgaggctgggaaatcgtttgaacccgggaagcggaggttgcagggagccgagatcacgccactgcactccagcctgggcgacagagcgagagtctgtctcaaaagaaaaaaaaaagcaccgcctccaaatgccaacttgtccttttgtaccatggtgtgaaagtcagatgcccagagggcccaggcaggccaccatattcagtgctgtggcctgggcaagataacgcacttctaactagaaatctgccaattttttaaaaaagtaagtaccactcaggccaacaagccaacgacaaagccaaactctgccagccacatccaaccccccacctgccatttgcaccctccgccttcactccggtgtgcctgcagccccgcgcctccttccttgctgtcctaggccacaccatctcctttcagggaatttcaggaactagagatgactgagtcctcgtagccatctctctactcctacctcagcctagaccctcctcctcccccagaggggtgggttcctcttccccactccccaccttcaattcctgggccccaaacgggctgccctgccactttggtacatggccagtgtgatcccaagtgccagtcttgtgtctgcgtctgtgttgcgtgtcgtgggtgtgtgtagccaaggtcggtaagttgaatggcctgccttgaagccactgaagctgggattcctccccattagagtcagccttccccctcccagggccagggccctgcagaggggaaaccagtgtagccttgcccggattctgggaggaagcaggttgaggggctcctggaaaggctcagtctcaggagcatggggataaaggagaaggcatgaaattgtctagcagagcaggggcagggtgataaattgttgataaattccactggacttgagcttggcagctgaactattggagggtgggagagcccagccattaccatggagacaagaagggttttccaccctggaatcaagatgtcagactggctggctgcagtgacgtgcacctgtactcaggaggctgaggggaggatcactggagcccaggagtttgaggctgcagcgagctatgatcgcgccactacactccagcctgagcaacagagtgagaccctgtctcttaaagaaaaaaaaagtcagactgctgggactggccaggtttctgcccacattggacccacatgaggacatgatggagcgcacctgccccctggtggacagtcctgggagaacctcaggcttccttggcatcacagggcagagccgggaagcgatgaatttggagactctgtggggccttggttcccttgtgtgtgtgtgttgatcccaagacaatgaaagtttgcactgtatgctggacggcattcctgcttatcaataaacctgtttgttttaaaaaaaa

SEQ ID NO: 52 - DNA, 1770 bp, Homo sapiens
  tumor necrosis factor (ligand) superfamily, member 10 (1)..(1770): LocusID: 8743; NM_003810
tttcatttcctcactgactataaaagaatagagaaggaagggcttcagtgaccggctgcctggctgacttacagcagtcagactctgacaggatcatggctatgatggaggtccaggggggacccagcctgggacagacctgcgtgctgatcgtgatcttcacagtgctcctgcagtctctctgtgtggctgtaacttacgtgtactttaccaacgagctgaagcagatgcaggacaagtactccaaaagtggcattgcttgtttcttaaaagaagatgacagttattgggaccccaatgacgaagagagtatgaacagcccctgctggcaagtcaagtggcaactccgtcagctcgttagaaagatgattttgagaacctctgaggaaaccatttctacagttcaagaaaagcaacaaaatatttctcccctagtgagagaaagaggtcctcagagagtagcagctcacataactgggaccagaggaagaagcaacacattgtcttctccaaactccaagaatgaaaaggctctgggccgcaaaataaactcctgggaatcatcaaggagtgggcattcattcctgagcaacttgcacttgaggaatggtgaactggtcatccatgaaaaagggttttactacatctattcccaaacatactttcgatttcaggaggaaataaaagaaaacacaaagaacgacaaacaaatggtccaatatatttacaaatacacaagttatcctgaccctatattgttgatgaaaagtgctagaaatagttgttggtctaaagatgcagaatatggactctattccatctatcaagggggaatatttgagcttaaggaaaatgacagaatttttgtttctgtaacaaatgagcacttgatagacatggaccatgaagccagttttttcggggcctttttagttggctaactgacctggaaagaaaaagcaataacctcaaagtgactattcagttttcaggatgatacactatgaagatgtttcaaaaaatctgaccaaaacaaacaaacagaaaacagaaaacaaaaaaacctctatgcaatctgagtagagcagccacaaccaaaaaattctacaacacacactgttctgaaagtgactcacttatcccaagagaatgaaattgctgaaagatctttcaggactctacctcatatcagtttgctagcagaaatctagaagactgtcagcttccaaacattaatgcaatggttaacatcttctgtctttataatctactccttgtaaagactgtagaagaaagagcaacaatccatctctcaagtagtgtatcacagtagtagcctccaggtttccttaagggacaacatccttaagtcaaaagagagaagaggcaccactaaaagatcgcagtttgcctggtgcagtggctcacacctgtaatcccaacattttgggaacccaaggtgggtagatcacgagatcaagagatcaagaccatagtgaccaacatagtgaaaccccatctctactgaaagtacaaaaattagctgggtgtgttggcacatgcctgtagtcccagctacttgagaggctgaggcaagagaattgtttgaacccgggaggcagaggttgcagtgtggtgagatcatgccactacactccagcctggcgacagagcgagacttggtttcaaaaaaaaaaaaaaaaaaaacttcagtaagtacgtgttatttttttcaataaaattctattacagtatgtcaaaaaaaaaaaa

SEQ ID NO: 53 - DNA, 4338 bp, Homo sapiens
  angiopoietin 1 (ANGPT1), transcript variant 1 (1)..(4338): LocusID: 284; NM_001146
ggggcacactcatgcattcctgtcaagtcatcttgtgaaaggctgcctgcttccagcttggcttggatgtgcaaccttaataaaactcactgaggtctgggagaaaatagcagatctgcagcagatagggtagaggaaagggtctagaatatgtacacgcagctgactcaggcaggctccatgctgaacggtcacacagagaggaaacaataaatctcagctactatgcaataaatatctcaagttttaacgaagaaaaacatcattgcagtgaaataaaaaattttaaaattttagaacaaagctaacaaatggctagttttctatgattcttcttcaaacgctttctttgagggggaaagagtcaaacaaacaagcagttttacctgaaataaagaactagttttagaggtcagaagaaaggagcaagttttgcgagaggcacggaaggagtgtgctggcagtacaatgacagttttcctttcctttgctttcctcgctgccattctgactcacatagggtgcagcaatcagcgccgaagtccagaaaacagtgggagaagatataaccggattcaacatgggcaatgtgcctacactttcattcttccagaacacgatggcaactgtcgtgagagtacgacagaccagtacaacacaaacgctctgcagagagatgctccacacgtggaaccggatttctcttcccagaaacttcaacatctggaacatgtgatggaaaattatactcagtggctgcaaaaacttgagaattacattgtggaaaacatgaagtcggagatggcccagatacagcagaatgcagttcagaaccacacggctaccatgctggagataggaaccagcctcctctctcagactgcagagcagaccagaaagctgacagatgttgagacccaggtactaaatcaaacttctcgacttgagatacagctgctggagaattcattatccacctacaagctagagaagcaacttcttcaacagacaaatgaaatcttgaagatccatgaaaaaaacagtttattagaacataaaatcttagaaatggaaggaaaacacaaggaagagttggacaccttaaaggaagagaaagagaaccttcaaggcttggttactcgtcaaacatatataatccaggagctggaaaagcaattaaacagagctaccaccaacaacagtgtccttcagaagcagcaactggagctgatggacacagtccacaaccttgtcaatctttgcactaaagaaggtgttttactaaagggaggaaaaagagaggaagagaaaccatttagagactgtgcagatgtatatcaagctggttttaataaaagtggaatctacactatttatattaataatatgccagaacccaaaaaggtgttttgcaatatggatgtcaatgggggaggttggactgtaatacaacatcgtgaagatggaagtctagatttccaaagaggctggaaggaatataaaatgggttttggaaatccctccggtgaatattggctggggaatgagtttatttttgccattaccagtcagaggcagtacatgctaagaattgagttaatggactgggaagggaaccgagcctattcacagtatgacagattccacataggaaatgaaaagcaaaactataggttgtatttaaaaggtcacactgggacagcaggaaaacagagcagcctgatcttacacggtgctgatttcagcactaaagatgctgataatgacaactgtatgtgcaaatgtgccctcatgttaacaggaggatggtggtttgatgcttgtggcccctccaatctaaatggaatgttctatactgcgggacaaaaccatggaaaactgaatgggataaagtggcactacttcaaagggcccagttactccttacgttccacaactatgatgattcgacctttagatttttgaaagcgcaatgtcagaagcgattatgaaagcaacaaagaaatccggagaagctgccaggtgagaaactgtttgaaaacttcagaagcaaacaatattgtctcccttccagcaataagtggtagttatgtgaagtcaccaaggttcttgaccgtgaatctggagccgtttgagttcacaagagtctctacttggggtgacagtgctcacgtggctcgactatagaaaactccactgactgtcgggctttaaaaagggaagaaactgctgagcttgctgtgcttcaaactactactggaccttattttggaactatggtagccagatgataaatatggttaatttcatgtaaaacagaaaaaaagagtgaaaaagagaatatacatgaagaatagaaacaagcctgccataatcctttggaaaagatgtattataccagtgaaaaggtgttatatctatgcaaacctactaacaaattatactgttgcacaattttgataaaaatttagaacagcattgtcctctgagttggttaaatgttaatggatttcagaagcctaattccagtatcatacttactagttgatttctgcttacccatcttcaaatgaaaattccatttttgtaagccataatgaactgtagtacatggacaataagtgtgtggtagaaacaaactccattactctgatttttgatacagttttcagaaaaagaaatgaacataatcaagtaaggatgtatgtggtgaaaacttaccacccccatactatggttttcatttactctaaaaactgattgaatgatatataaatatatttatagcctgagtaaagttaaaagaatgtaaaatatatcatcaagttcttaaaataatatacatgcatttaatatttcctttgatattatacaggaaagcaatattttggagtatgttaagttgaagtaaaagcaagtactctggagcagttcattttacagtatctacttgcatgtgtatacatacatgtaacttcattattttaaaaatatttttagaactccaatactcaccctgttatgtcttgctaatttaaattttgctaattaactgaaacatgcttaccagattcacactgttccagtgtctataaaagaaacactttgaagtctataaaaaataaaataattataaatatcattgtacatagcatgtttatatctgcaaaaaacctaatagctaattaatctggaatatgcaacattgtccttaattgatgcaaataacacaaatgctcaaagaaatctactatatcccttaatgaaatacatcattcttcatatatttctccttcagtccattcccttaggcaatttttaatttttaaaaattattatcaggggagaaaaattggcaaaactattatatgtaagggaaatatatacaaaaagaaaattaatcatagtcacctgactaagaaattctgactgctagttgccataaataactcaatggaaatattcctatgggataatgtattttaagtgaatttttggggtgcttgaagttactgcattattttatcaagaagtcttctctgcctgtaagtgtccaaggttatgacagtaaacagtttttattaaaacatgagtcactatgggatgagaaaattgaaataaagctactgggcctcctctcataaaagagacagttgttggcaaggtagcaataccagtttcaaacttggtgacttgatccactatgccttaatggtttcctccatttgagaaaataaagctattcacattgttaagaaaaatactttttaaagtttaccatcaagtcttttttatatttatgtgtctgtattctacccctttttgccttacaagtgatatttgcaggtattataccatttttctattcttggtggcttcttcatagcaggtaagcctctccttctaaaaacttctcaactgttttcatttaagggaaagaaaatgagtattttgtccttttgtgttcctacagacactttcttaaaccagtttttggataaagaatactatttccaaactcatattacaaaaacaaaataaaataataaaaaaagaaagcatgatatttactgttttgttgtctgggtttgagaaatgaaatattgtttccaattatttataataaatcagtataaaatgttttatgattgttatgtgtattatgtaatacgtacatgtttatggcaatttaacatgtgtattcttttaattgtttcagaataggataattaggtattcgaattttgtctttaaaattcatgtggtttctatgcaaagttcttcatatcatcacaacattatttgatttaaataaaattgaaagtaatatttgtgcaa

SEQ ID NO: 54 - DNA, 2360 bp, Homo sapiens
  angiopoietin 1 (ANGPT1), transcript variant 2 (1)..(2360): LocusID: 284; NM_139290
ggggcacactcatgcattcctgtcaagtcatcttgtgaaaggctgcctgcttccagcttggcttggatgtgcaaccttaataaaactcactgaggtctgggagaaaatagcagatctgcagcagatagggtagaggaaagggtctagaatatgtacacgcagctgactcaggcaggctccatgctgaacggtcacacagagaggaaacaataaatctcagctactatgcaataaatatctcaagttttaacgaagaaaaacatcattgcagtgaaataaaaaattttaaaattttagaacaaagctaacaaatggctagttttctatgattcttcttcaaacgctttctttgagggggaaagagtcaaacaaacaagcagttttacctgaaataaagaactagttttagaggtcagaagaaaggagcaagttttgcgagaggcacggaaggagtgtgctggcagtacaatgacagttttcctttcctttgctttcctcgctgccattctgactcacatagggtgcagcaatcagcgccgaagtccagaaaacagtgggagaagatataaccggattcaacatgggcaatgtgcctacactttcattcttccagaacacgatggcaactgtcgtgagagtacgacagaccagtacaacacaaacgctctgcagagagatgctccacacgtggaaccggatttctcttcccagaaacttcaacatctggaacatgtgatggaaaattatactcagtggctgcaaaaacttgagaattacattgtggaaaacatgaagtcggagatggcccagatacagcagaatgcagttcagaaccacacggctaccatgctggagataggaaccagcctcctctctcagactgcagagcagaccagaaagctgacagatgttgagacccaggtactaaatcaaacttctcgacttgagatacagctgctggagaattcattatccacctacaagctagagaagcaacttcttcaacagacaaatgaaatcttgaagatccatgaaaaaaacagtttattagaacataaaatcttagaaatggaaggaaaacacaaggaagagttggacaccttaaaggaagagaaagagaaccttcaaggcttggttactcgtcaaacatatataatccaggagctggaaaagcaattaaacagagctaccaccaacaacagtgtccttcagaagcagcaactggagctgatggacacagtccacaaccttgtcaatctttgcactaaagaaggtgttttactaaagggaggaaaaagagaggaagagaaaccatttagagactgtgcagatgtatatcaagctggttttaataaaagtggaatctacactatttatattaataatatgccagaacccaaaaaggtgttttgcaatatggatgtcaatgggggaggttggactgtaatacaacatcgtgaagatggaagtctagatttccaaagaggctggaaggaatataaaatgggttttggaaatccctccggtgaatattggctggggaatgagtttatttttgccattaccagtcagaggcagtacatgctaagaattgagttaatggactgggaagggaaccgagcctattcacagtatgacagattccacataggaaatgaaaagcaaaactataggtaagtcatgctacagtgtagtgttcgactaccttttacctagccacttaataattgtagtgggaaaatatgaaaaaaagaaatgaaaatcatccttcaaaatgaaaattcttttttttttgtctagacctattacaaagaggtacaaaaaagcctgtaaagactttttcaaagatttaaatttcagttttcgtaggttgactatctttgatattggcttaaattttagggaatggtgaatgaagtcaagcatactgttgttctgtggttatcatgcagttgcagtgaattcatatatataaaactgataagtttcatactcaaactcattggcttaaataatctctttattctaaaaaaagattttctggttctactttttttgatgacctttcttgaattagcatttttcaaatgatcttgaagatgacaaaagtaaaatttttttatgtttgaatgatttacataaaagagaagatgaggcatgatttagagggttttcttggtaaatctaaaaagcaaaaataaattgtaataatggcatcaatatacataatacatgattgcagatgtaaaaatagataaactatacacttaatgatacatgtttccaattatcctttttcaatgagaagctcgtctactagggaaaaataaacacacaaaaatatggctaaaaaaaaaaaa

SEQ ID NO: 55 - DNA, 5430 bp, Homo sapiens
  retinoid X receptor, alpha (1)..(5430): LocusID: 6256; NM_002957
gcgccgggggccgccgcgcccgccgcccgctgcctgcgccgccggccgggcatgagttagtcgcagacatggacaccaaacatttcctgccgctcgatttctccacccaggtgaactcctccctcacctccccgacggggcgaggctccatggctgccccctcgctgcacccgtccctggggcctggcatcggctccccgggacagctgcattctcccatcagcaccctgagctcccccatcaacggcatgggcccgcctttctcggtcatcagctcccccatgggcccccactccatgtcggtgcccaccacacccaccctgggcttcagcactggcagcccccagctcagctcacctatgaaccccgtcagcagcagcgaggacatcaagccccccctgggcctcaatggcgtcctcaaggtccccgcccacccctcaggaaacatggcttccttcaccaagcacatctgcgccatctgcggggaccgctcctcaggcaagcactatggagtgtacagctgcgaggggtgcaagggcttcttcaagcggacggtgcgcaaggacctgacctacacctgccgcgacaacaaggactgcctgattgacaagcggcagcggaaccggtgccagtactgccgctaccagaagtgcctggccatgggcatgaagcgggaagccgtgcaggaggagcggcagcgtggcaaggaccggaacgagaatgaggtggagtcgaccagcagcgccaacgaggacatgccggtggagaggatcctggaggctgagctggccgtggagcccaagaccgagacctacgtggaggcaaacatggggctgaaccccagctcgccgaacgaccctgtcaccaacatttgccaagcagccgacaaacagcttttcaccctggtggagtgggccaagcggatcccacacttctcagagctgcccctggacgaccaggtcatcctgctgcgggcaggctggaatgagctgctcatcgcctccttctcccaccgctccatcgccgtgaaggacgggatcctcctggccaccgggctgcacgtccaccggaacagcgcccacagcgcaggggtgggcgccatctttgacagggtgctgacggagcttgtgtccaagatgcgggacatgcagatggacaagacggagctgggctgcctgcgcgccatcgtcctctttaaccctgactccaaggggctctcgaacccggccgaggtggaggcgctgagggagaaggtctatgcgtccttggaggcctactgcaagcacaagtacccagagcagccgggaaggttcgctaagctcttgctccgcctgccggctctgcgctccatcgggctcaaatgcctggaacatctcttcttcttcaagctcatcggggacacacccattgacaccttccttatggagatgctggaggcgccgcaccaaatgacttaggcctgcgggcccatcctttgtgcccacccgttctggccaccctgcctggacgccagctgttcttctcagcctgagccctgtccctgcccttctctgcctggcctgtttggactttggggcacagcctgtcactgctctgcctaagagatgtgttgtcaccctccttatttctgttactacttgtctgtggcccagggcagtggctttcctgaggcagcagccttcgtggcaagaactagcgtgagcccagccaggcgcctccccaccgggctctcaggacaccctgccacaccccacggggcttgggcgactacagggtcttcgggccccagccctggagctgcaggagttgggaacggggcttttgtttccgttgctgtttatcgatgctggttttcagaattcctgtgtggccctcctgtctggagtgacatcttcatctgctctgaatactggtgcccagccagcccgtgacagcttccccctaatcaggaggggacagctgggggcgcaagctggtgtgtcatcagcaaagacctcagccgcctcggggatgagaggggactcgtggggcaagcaagctgccctgtgctctgagtgagggggaaggtagcccctttttccaaagataactcacagttttgccctcgagccaatgagaacatgagctgccctctgtgcaaggtttcggggccacctccaggctgcaggggcgggtcactcacccccctgttttctctctgccttggtgttctggtttcagactcccgactccccgttcagaccagagtgccccggcccctccccagcctgagtcttctccttgctctgcggggtgggctgaggcttgtccttgtttcctgcagggctggccctggctcgggcagggtggggcatcaccacctcactggccttgctggaggcacagggctctgcggacctgcagccatctgtgaggcccgcggggatgggaggggaggagggtggcctgttggtttccctcagagggggcaggtggcctggagagagaggggctcaggaactgggagcctcgtgggtggggcagatgctccgcggcctggagtggctctgccggggcattggtgggacccctgctcaggccttctctctggctgccagttgtgtctaaaagactcttggaatctgagaacccggagtcgcagcgccctcgggcctgggccacacgcaggccctggtgggaccacccagcctggtattgtccacggacagcgttgttcacccagagccttacttgggagcctcactgaacgcctgctctggttgaaggtggggtgggggcggggcttggggcctccctggctcagcccagtgcggcctggcgctcctcccgcaggctctgcccccgggctccggtggtgcggggccctctcaggttgaactcgcctcttttgcactggaaggccctccctttggcctgagtacttttcccgttcacgcctcagtcccgtggacccagcctttgtcagtggcaggtgcctgaacagagggtggatgggggggataccggagggggtcttgtcttcccagccgcagtctaggaatgatgcgggggggtggacgccttctccatagtctttccccacctggagcaggggcttcctcagtggtgaggggagctgcctacaggttggaccgggaggcagtggcttggagaggcagctttccagccttggtggggaagaaagtgtccattctttgccttcctggagctcccagccagagctgagcttaggcacccgagtggagcctgcagctgagtctgtgcccgagacaggctgtcagagattccagaagcctctcctccccgccgccctccacccctgcctttcagcgttgtggatccctagaggtggccccctgcccgatccaccgtcctgaggcagagtgttgagcctcatacctgtaccaggtccccggccagctgggcccctcccaggcactgccaggaagccccagctgcccctggcgggtgtggtggaaatggcaggagggtgcaggtactcttggggccccagcggtgggagtgcaaaagacccaacgccaacacctggtgccttttgcagccagcgcccacccatccgtgcccggacccttgggaatgcccgcggctccagaggaaaaagcccagggacggggcctccgttgcggggggtcggctgcttcttgggaactttgtcgtttccggcgctggctggctggctggctgtaaagcactgaagccccccggccgccaacccctgaaagcagaacctggcctccctggccacagcagccttacccaccgctctacgtgtcccgggcacttcccgcagccttcccgtccctttctcatcggccttgtagttgtacagtgctgttggtttgaaaaggtgatgtgtggggagtgcggctcatcactgagtagagaggtagaatttctatttaaccagacctgtagtagtattaccaatccagttcaattaaggtgattttttgtaattattattattttggtgggacaatctttaattttctaaagatagcactaacatcagctcattagccacctgtgcctgtccccgccttggcccggctggatgaagcggcttccccgcagggcccccacttcccagtggctgcttcctggggacccagggcaccccggcaccttcaggcacgctcctcagctggtcacctcccggctttgccgttcagatggggctcctgaggctcaggagtgaagatgccacagagccgggctcccctaggctgcgtcgggcatgcttggaagctggcctgccaggaccttccaccctggggcctgtgtcagccgccggccctccgcaccctggaagcacacggcctctgggaaggacagccctgaccttcggttttccgagcacggtgtttcccaagaattctgggctggcggcctggtggcagtgctggagatgaccccgagcccctccccgtggggcacccaggagggccctgccggaatgtgcagcctgtgggtagtcggctggtgtccctgtcgtggagctggggtgcgtgatctggtgctcgtccacgcaggtgtgtggtgtaaacatgtatgtgctgtacagagagacgcgtgtggagagagccgcacaccagcgccacccaggaaaggcggagcggttaccagtgttttgtgtttatttttaatcaagacgtttcccctgttttcctataaatttgcttcgtgtaagcaagtacataaggaccctcctttggtgaaatccgggttcgaatgaatatctcaaggcaggagatgcatctattttaagatgctttggagcagacagctttagccgttcccaatccttagcaatgccttagctgggacgcatagctaatactttagagaggatgacagatccataaagagagtaaagataagagaaaatgtctaaagcatctggaaaggtaaaaaaaaaaaatctatttttgtacaaatgtaattttatccctcatgtatacttggatatggcggggggagggctgggactgtttcgtttctgcttctagagattgaggtgaaagcttcgtccgagaaacgccaggacagacgatggcagaggagagggctcctgtgacggcggcgaggcttgggaggaaaccgccgcaatgggggtgtcttccctcggggcaggagggtgggcctgaggctttcaagggttttcttccctttcgagtaatttttaaagccttgctctgttgtgtcctgttgccggctctggccttcctgtgactgactgtgaagtggcttctccgtacgattgtctctgaaacatcgtggcctcaggtgccagggtttgatggacagtagcattagaattgtggaaaaggaacacgcaaagggagaagtgtgagaggagaaacaaaatatgagcgtttaaaatacatcgccattcagttcgttaaaaaa

SEQ ID NO: 56 - DNA, 2050 bp, Homo sapiens
  degenerative spermatocyte homolog, lipid desaturase transcript variant 1 (1)..(2050): LocusID: 8560; NM_003676
cacagccggccgacaccacaccagccggggagccgccgccgccgccgccacctctgagcagccggctgggagcgagagccgacagctagtctgcaagccaccgctgtcgccatggggagccgcgtctcgcgggaagacttcgagtgggtctacaccgaccagccgcacgccgaccggcgccgggagatcctggcaaagtatccagagataaagtccttgatgaaacctgatcccaatttgatatggattataattatgatggttctcacccagttgggtgcattttacatagtaaaagacttggactggaaatgggtcatatttggggcctatgcgtttggcagttgcattaaccactcaatgactctggctattcatgagattgcccacaatgctgcctttggcaactgcaaagcaatgtggaatcgctggtttggaatgtttgctaatcttcctattgggattccatattcaatttcctttaagaggtatcacatggatcatcatcggtaccttggagctgatggcgtcgatgtagatattcctaccgattttgagggctggttcttctgtaccgctttcagaaagtttatatgggttattcttcagcctctcttttatgcctttcgacctctgttcatcaaccccaaaccaattacgtatctggaagttatcaataccgtggcacaggtcacttttgacattttaatttattactttttgggaattaaatccttagtctacatgttggcagcatctttacttggcctgggtttgcacccaatttctggacattttatagctgagcattacatgttcttaaagggtcatgaaacttactcatattatgggcctctgaatttacttaccttcaatgtgggttatcataatgaacatcatgatttccccaacattcctggaaaaagtcttccactggtgaggaaaatagcagctgaatactatgacaacctccctcactacaattcctggataaaagtactgtatgattttgtgatggatgatacaataagtccctactcaagaatgaagaggcaccaaaaaggagagatggtgctggagtaaatatcattagtgccaaagggattcttctccaaaactttagatgataaaatggaatttttgcattattaaacttgagaccagtgatgctcagaagctcccctggcacaatttcagagtaagagctcggtgataccaagaagtgaatctggcttttaaacagtcagcctgactctgtactgctcagtttcactcacaggaaacttgtgacttgtgtattatcgtcattgaggatgtttcactcatgtctgtcattttataagcatatcatttaaaaagcttctaaaaagctatttcgccaggcacggtggctcatgcctataatcccagcactttgggaggccaaggtgggtggatcacctgaggtcaggagttcgagaccagcctggccaacacggtgaaaccccatctctactaaaaatgcaaaaattagccgggcgtggcggcacatgcctgtaatcccagctacatgggaggctgaggtgggagaattgcttgaacccaggaggcggaggcagaggctgcagtgacccaagattgtgccactgcactccaccctgggcaacagagcaagaccccatctcaaaaataaataaatatatataaaaaataaaaagctatttctagtttatttcactataaagttttgctttattaaaaagctaataaacagctattaatcacagtgtattagtatttgttacatttttgtatttcactatctttatactatataatatggtaacttgggtaccgggggaactttaaaatttcatctcaaaaataatttttaaaaagcctgaggtatgatatagcataaaagattgagatgaaaatatatttccctgtaagctgaattactcatttaaaaattttaacttctatatgggacccgaattagacactgctgaatcctgtacagccttactcataaataaagtacttactgaatttccaccattcaaaaaaa

SEQ ID NO: 57 - DNA, 1670 bp, Homo sapiens
  degenerative spermatocyte homolog, lipid desaturase transcript variant 2 (1)..(1670): LocusID: 8560; NM_144780
cacagccggccgacaccacaccagccggggagccgccgccgccgccgccacctctgagcagccggctgggagcgagagccgacagctagtctgcaagccaccgctgtcgccatggggagccgcgtctcgcgggaagacttcgagtgggtctacaccgaccagccgcacgccgaccggcgccgggagatcctggcaaagtatccagagataaagtccttgatgaaacctgatcccaatttgatatggattataattatgatggttctcacccagttgggtgcattttacatagtaaaagacttggactggaaatgggtcatatttggggcctatgcgtttggcagttgcattaaccactcaatgactctggctattcatgagattgcccacaatgctgcctttggcaactgcaaagcaatgtggaatcgctggtttggaatgtttgctaatcttcctattgggattccatattcaatttcctttaagaggtatcacatggatcatcatcggtaccttggagctgatggcgtcgatgtagatattcctaccgattttgagggctggttcttctgtaccgctttcagaaagtttatatgggttattcttcagcctctcttttatgcctttcgacctctgttcatcaaccccaaaccaattacgtatctggaagttatcaataccgtggcacaggtcacttttgacattttaatttattactttttgggaattaaatccttagtctacatgttggcagcatctttacttggcctgggtttgcacccaatttctggacattttatagctgagcattacatgttcttaaagggtcatgaaacttactcatattatgggcctctgaatttacttaccttcaatgtgggttatcataatgaacatcatgatttccccaacattcctggaaaaagtcttccactggtgaggaaaatagcagctgaatactatgacaacctccctcactacaattcctggataaaagtactgtatgattttgtgatggatgatacaataagtccctactcaagaatgaagaggcaccaaaaaggagagatggtgctggagtaaatatcattagtgccaaagggattcttctccaaaactttagatgataaaattagccgggcgtggcggcacatgcctgtaatcccagctacatgggaggctgaggtgggagaattgcttgaacccaggaggcggaggcagaggctgcagtgacccaagattgtgccactgcactccaccctgggcaacagagcaagaccccatctcaaaaataaataaatatatataaaaaataaaaagctatttctagtttatttcactataaagttttgctttattaaaaagctaataaacagctattaatcacagtgtattagtatttgttacatttttgtatttcactatctttatactatataatatggtaacttgggtaccgggggaactttaaaatttcatctcaaaaataatttttaaaaagcctgaggtatgatatagcataaaagattgagatgaaaatatatttccctgtaagctgaattactcatttaaaaattttaacttctatatgggacccgaattagacactgctgaatcctgtacagccttactcataaataaagtacttactgaatttccaccattcaaaa

SEQ ID NO: 58 - DNA, 2447 bp, Homo sapiens
  solute carrier family 7 member 7 (1)..(2447): LocusID: 9056; NM_003982
gcatggaggacacagagagagagagtgctgtgtattccttccccgctactgtcctgtcctcagctaacttgctctgggacagcttccccagggctacagatactgcactcagctgactgtcctttcttctgggcccctggtcccagagcagagctgacaaaggagattcctgagagagcaccttcttatcacagaaagtgctgagccaagagctcctagctgccccttttgcagatgtgaagggccagtgaaccttggacccagatggttgcttaatactcctttccccctccctcactccttcctttgcgggctgcctcacctcctccacccttcttgcttaaatccataggcatttgtctggccttcccttttactgctggctgggaaggaggagcatcagaccacagatcctggaaggcacttctctccctgactgccgctcacactgccgtgagaacctgcttatatccaggaccaaggaggcaatgccaggaagctggtgaagggtttcctctcctccaccatggttgacagcactgagtatgaagtggcctcccagcctgaggtggaaacctcccctttgggtgatggggccagcccagggccggagcaggtgaagctgaagaaggagatctcactgcttaacggcgtgtgcctgattgtggggaacatgatcggctcaggcatctttgtttcccccaagggtgtgctcatatacagtgcctcctttggtctctctctggtcatctgggctgtcgggggcctcttctccgtctttggggccctttgttatgtggaactgggcaccaccattaagaaatctggggccagctatgcctatatcctggaggcctttggaggattccttgctttcatcagactctggacctccctgctcatcattgagcccaccagccaggccatcattgccatcacctttgccaactacatggtacagcctctcttcccgagctgcttcgccccttatgctgccagccgcctgctggctgctgcctgcatttgtctcttaaccttcattaactgtgcctatgtcaaatggggaaccctggtacaagatattttcacctatgctaaagtattggcactgatcgcggtcatcgttgcaggcattgttagacttggccagggagcctctactcattttgagaattcctttgagggttcatcatttgcagtgggtgacattgccctggcactgtactcagctctgttctcctactcaggctgggacaccctcaactatgtcactgaagagatcaagaatcctgagaggaacctgcccctctccattggcatctccatgcccattgtcaccatcatctatatcttgaccaatgtggcctattatactgtgctagacatgagagacatcttggccagtgatgctgttgctgtgacttttgcagatcagatatttggaatatttaactggataattccactgtcagttgcattatcctgttttggtggcctcaatgcctccattgtggctgcttctaggcttttctttgtgggctcaagagaaggccatctccctgatgccatctgcatgatccatgttgagcggttcacaccagtgccttctctgctcttcaatggtatcatggcattgatctacttgtgcgtggaagacatcttccagctcattaactactacagcttcagctactggttctttgtggggctttctattgtgggtcagctttatctgcgctggaaggagcctgatcgacctcgtcccctcaagctcagcgttttcttcccgattgtcttctgcctctgcaccatcttcctggtggctgttccactttacagtgatactatcaactccctcatcggcattgccattgccctctcaggcctgcccttttacttcctcatcatcagagtgccagaacataagcgaccgctttacctccgaaggatcgtggggtctgccacaaggtacctccaggtcctgtgtatgtcagttgctgcagaaatggatttggaagatggaggagagatgcccaagcaacgggatcccaagtctaactaaacaccatctggaatcctgatgtggaaagcaggggtttctggtctactggctagagctaaggaagttgaaaaggaaagctcacttctttggaggcacctgtccagaagcctggcctaggcagcttcaacctttgaacttactttttgaaatgaaaagtaatttatttgttttgctacatactgttccagacttttaaaggggacaatgaaggtgactgtggggaggagcatgtcaggtttgggcttggttgttttagaagcacctgggtgtgcctacctactcctcttttcttttaaaagggcccacaatgctccaatttcctgtctcctttagagagacatgaaactatcacaggtgctggatgacaataaaagtttatgttcct

SEQ ID NO: 59 - DNA, 3490 bp, Homo sapiens
  procollagen-lysine, 2-oxoglutarate 5-dioxygenase 2 transcript variant 2 (1)..(3490): LocusID: 5352; NM_000935
atggggggatgcacggtgaagcctcagctgctgctcctggcgctcgtcctccacccctggaatccctgtctgggtgcggactcggagaagccctcgagcatccccacagataaattattagtcataactgtagcaacaaaagaaagtgatggattccatcgatttatgcagtcagccaaatatttcaattatactgtgaaggtccttggtcaaggagaagaatggagaggtggtgatggaattaatagtattggagggggccagaaagtgagattaatgaaagaagtcatggaacactatgctgatcaagatgatctggttgtcatgtttactgaatgctttgatgtcatatttgctggtggtccagaagaagttctaaaaaaattccaaaaggcaaaccacaaagtggtctttgcagcagatggaattttgtggccagataaaagactagcagacaagtatcctgttgtgcacattgggaaacgctatctgaattcaggaggatttattggctatgctccatatgtcaaccgtatagttcaacaatggaatctccaggataatgatgatgatcagctcttttacactaaagtttacattgatccactgaaaagggaagctattaacatcacattggatcacaaatgcaaaattttccagaccttaaatggagctgtagatgaagttgttttaaaatttgaaaatggcaaagccagagctaagaatacattttatgaaacattaccagtggcaattaatggaaatggacccaccaagattctcctgaattattttggaaactatgtacccaattcatggacacaggataatggctgcactctttgtgaattcgatacagtcgacttgtctgcagtagatgtccatccaaacgtatcaataggtgtttttattgagcaaccaaccccttttctacctcggtttctggacatattgttgacactggattacccaaaagaagcacttaaactttttattcataacaaagaagtttatcatgaaaaggacatcaaggtattttttgataaagctaagcatgaaatcaaaactataaaaatagtaggaccagaagaaaatctaagtcaagcggaagccagaaacatgggaatggacttttgccgtcaggatgaaaagtgtgattattactttagtgtggatgcagatgttgttttgacaaatccaaggactttaaaaattttgattgaacaaaacagaaagatcattgctcctcttgtaactcgtcatggaaagctgtggtccaatttctggggagcattgagtcctgatggatactatgcacgatctgaagattatgtggatattgttcaagggaatagagtaggagtatggaatgtcccatatatggctaatgtgtacttaattaaaggaaagacactccgatcagagatgaatgaaaggaactattttgttcgtgataaactggatcctgatatggctctttgccgaaatgctagagaaatgggtgtatttatgtacatttctaatagacatgaatttggaaggctattatccactgctaattacaatacttcccattataacaatgacctctggcagatttttgaaaatcctgtggactggaaggaaaagtatataaaccgtgattattcaaagattttcactgaaaatatagttgaacagccctgtccagatgtcttttggttccccatattttctgaaaaagcctgtgatgaattggtagaagaaatggaacattacggcaaatggtctgggggaaaacatcatgatagccgtatatctggtggttatgaaaatgtcccaactgatgatatccacatgaagcaagttgatctggagaatgtatggcttgattttatccgggagttcattgcaccagttacactgaaggtctttgcaggctattatacgaagggatttgcactactgaattttgtagtaaaatactcccctgaacgacagcgttctcttcgtcctcatcatgatgcttctacatttaccataaacattgcacttaataacgtgggagaagactttcagggaggtggttgcaaatttctaaggtacaattgctctattgagtcaccacgaaaaggctggagcttcatgcatcctgggagactcacacatttgcatgaaggacttcctgttaaaaatggaacaagatacattgcagtgtcatttatagatccctaagttatttacttttcattgaattgaaatttattttgggtgaatgactggcatgaacacgtctttgaagttgtggctgagaagatgagaggaatatttaaataacatcaacagaacaacttcactttgggccaaacatttgaaaaactttttataaaaaattgtttgatatttcttaatgtctgctctgagccttaaaacacagattgaagaagaaaagaaagaaaaaacttaaatatttatttctatgctttgttgcctctgagaataatgacaatttatgaatttgtgtttcaaattgataaaatatttaggtacaaataacaagactaataatattttcttatttaaaaaaagcatgggaagatttttatttatcaaaatatagaggaaatgtagacaaaatggatataaatgaaaattaccatgttgtaaaaccttgaaaatcagattctaactgattgtatgcaactaagtatttctgaacacctatgcaggtcttatttacagtgttactaagggaacacacaaagaattacacaacgttttcctcaagaaaatggtacaaaacacaaccgaggagcgtatacagttgaaaacatttttgttttgattggaaggcagattattttatattagtattaaaaatcaaaccctatgtttctttcagatgaatcttccaaagtggattatattaagcaggtattagatttagaaaacctttccatttcttaaagtattatcaagtgtcaagatcagcaagtgtccttaagtcaaataggtttttttttgttggtggttgtgcttgctttccttttttagaaagttctagaaaataggaaaacgaaaaatttcattgagatgagtagtgcatttaattattttttaaaaaactttttaagtacttgaattttatatcaggaaaacaaagttgttgagccttgcttcttccgttttgccctttgtctcgctccttattcttttttggggggagggttatttgcttttttatcttcctggcataatttccattttattcttctgagtgtctatgttaacttccctctatcccgcttataaaaaaattctccaacaaaaatacttgttgacttgatgttttatcacttctctaagtaaggttgaaatatccttattgtagctactgtttttaatgtaaaggttaaacttgaaaagaaattcttaatcacggtgccaaaattcattttctaacaccatgtgttagaaaattataaaaaataaaataattttaaaaaaaaaa

SEQ ID NO: 60 - DNA, 3730 bp, Homo sapiens
  procollagen-lysine, 2-oxoglutarate 5-dioxygenase 2 transcript variant 1 (1)..(3730): LocusID: 5352; NM_182943
ccacgcgtccgctcagctgcgttacgcgccgctccggctgccggccgcgcgccttgcccgccggctcccgcccgcaatcggcggctcagggcggacccgggtctctgcgttctcgcgagaagcgcggcgctgcggggccgtgggcgcctgagcccgcgcggccctcgagggccgaatatggggggatgcacggtgaagcctcagctgctgctcctggcgctcgtcctccacccctggaatccctgtctgggtgcggactcggagaagccctcgagcatccccacagataaattattagtcataactgtagcaacaaaagaaagtgatggattccatcgatttatgcagtcagccaaatatttcaattatactgtgaaggtccttggtcaaggagaagaatggagaggtggtgatggaattaatagtattggagggggccagaaagtgagattaatgaaagaagtcatggaacactatgctgatcaagatgatctggttgtcatgtttactgaatgctttgatgtcatatttgctggtggtccagaagaagttctaaaaaaattccaaaaggcaaaccacaaagtggtctttgcagcagatggaattttgtggccagataaaagactagcagacaagtatcctgttgtgcacattgggaaacgctatctgaattcaggaggatttattggctatgctccatatgtcaaccgtatagttcaacaatggaatctccaggataatgatgatgatcagctcttttacactaaagtttacattgatccactgaaaagggaagctattaacatcacattggatcacaaatgcaaaattttccagaccttaaatggagctgtagatgaagttgttttaaaatttgaaaatggcaaagccagagctaagaatacattttatgaaacattaccagtggcaattaatggaaatggacccaccaagattctcctgaattattttggaaactatgtacccaattcatggacacaggataatggctgcactctttgtgaattcgatacagtcgacttgtctgcagtagatgtccatccaaacgtatcaataggtgtttttattgagcaaccaaccccttttctacctcggtttctggacatattgttgacactggattacccaaaagaagcacttaaactttttattcataacaaagaagtttatcatgaaaaggacatcaaggtattttttgataaagctaagcatgaaatcaaaactataaaaatagtaggaccagaagaaaatctaagtcaagcggaagccagaaacatgggaatggacttttgccgtcaggatgaaaagtgtgattattactttagtgtggatgcagatgttgttttgacaaatccaaggactttaaaaattttgattgaacaaaacagaaagatcattgctcctcttgtaactcgtcatggaaagctgtggtccaatttctggggagcattgagtcctgatggatactatgcacgatctgaagattatgtggatattgttcaagggaatagagtaggagtatggaatgtcccatatatggctaatgtgtacttaattaaaggaaagacactccgatcagagatgaatgaaaggaactattttgttcgtgataaactggatcctgatatggctctttgccgaaatgctagagaaatgactttacaaagggaaaaagactcccctactccggaaacattccaaatgctcagccccccaaagggtgtatttatgtacatttctaatagacatgaatttggaaggctattatccactgctaattacaatacttcccattataacaatgacctctggcagatttttgaaaatcctgtggactggaaggaaaagtatataaaccgtgattattcaaagattttcactgaaaatatagttgaacagccctgtccagatgtcttttggttccccatattttctgaaaaagcctgtgatgaattggtagaagaaatggaacattacggcaaatggtctgggggaaaacatcatgatagccgtatatctggtggttatgaaaatgtcccaactgatgatatccacatgaagcaagttgatctggagaatgtatggcttcattttatccgggagttcattgcaccagttacactgaaggtctttgcaggctattatacgaagggatttgcactactgaattttgtagtaaaatactcccctgaacgacagcgttctcttcgtcctcatcatgatgcttctacatttaccataaacattgcacttaataacgtgggagaagactttcagggaggtggttgcaaatttctaaggtacaattgctctattgagtcaccacgaaaaggctggagcttcatgcatcctgggagactcacacatttgcatgaaggacttcctgttaaaaatggaacaagatacattgcagtgtcatttatagatccctaagttatttacttttcattgaattgaaatttattttgggtgaatgactggcatgaacacgtctttgaagttgtggctgagaagatgagaggaatatttaaataacatcaacagaacaacttcactttgggccaaacatttgaaaaactttttataaaaaattgtttgatatttcttaatgtctgctctgagccttaaaacacagattgaagaagaaaagaaagaaaaaacttaaatatttatttctatgctttgttgcctctgagaataatgacaatttatgaatttgtgtttcaaattgataaaatatttaggtacaaataacaagactaataatattttcttatttaaaaaaagcatgggaagatttttatttatcaaaatatagaggaaatgtagacaaaatggatataaatgaaaattaccatgttgtaaaaccttgaaaatcagattctaactggatttgtatgcaactaagtatttttctgaacacctatgcaggtcttatttacagtagttactaagggaacacacaaagaattacacaacgttttcctcaagaaaatggtacaaaacacaaccgaggagcgtatacagttgaaaacatttttgttttgattggaaggcagattattttatattagtattaaaaatcaaaccctatgtttctttcagatgaatcttccaaagtggattatattaagcaggtattagatttaggaaaacctttccatttcttaaagtattatcaagtgtcaagatcagcaagtgtccttaagtcaaacaggttttttttgttgttgtttttgctttgtttccttttttagaaagttctagaaaataggaaaacgaaaaatttcattgagatgagtagtgcatttaattattttttaaaaaactttttaagtacttgaattttatatcaggaaaacaaagttgttgagccttgcttcttccgttttgccctttgtctcgctccttattctttttttggggggagggttatttgcttttttatcttcctggcataatttccattttattcttctgagtgtctatgttaacttccctctatcccgcttataaaaaaattctccaacaaaaatacttgttgacttgatgttttatcacttctctaagtaaggttgaaatatccttattgtagctactgtttttaatgtaaaggttaaacttgaaaagaaattcttaatcacggtgccaaaattcattttctaacaccatgtgttagaaaattataaaaaataaaataattttagaa

SEQ ID NO: 61 - DNA, 2950 bp, Homo sapiens
  UDP-glucose dehydrogenase (1)..(2950): LocusID: 7358;  NM_003359
gcggcccgtaggaaggtgctgtccgatcgatcgggataggagcggtccctgcgcttgctgctgggaagtggtacaatcatgtttgaaattaagaagatctgttgcatcggtgcaggctatgttggaggacccacatgtagtgtcattgctcatatgtgtcctgaaatcagggtaacggttgttgatgtcaatgaatcaagaatcaatgcgtggaattctcctacacttcctatttatgagccaggactaaaagaagtggtagaatcctgtcgaggaaaaaatctttttttttctaccaatattgatgatgccatcaaagaagctgatcttgtatttatttctgtgaatactccaacaaaaacctatggaatggggaaaggccgggcagcagatctgaagtatattgaagcttgtgctagacgcattgtgcaaaactcaaatgggtacaaaattgtgactgagaaaagcacagttccagtgcgggcagcagaaagtatccgtcgcatatttgatgcaaacacaaaacccaacttgaatttacaggtgctgtccaaccctgagtttctggcagagggaacagccatcaaggacctaaagaacccagacagagtactgattggaggggatgaaactccagagggccagagagctgtgcaggccctgtgtgctgtatatgagcactgggttcccagagaaaagatcctcaccactaatacttggtcttcagagctttccaaactggcagcaaatgcttttcttgcccagagaataagcagcattaactccataagtgctctgtgtgaagcaacaggagctgatgtagaagaggtagcaacagcgattggaatggaccagagaattggaaacaagtttctaaaagccagtgttgggtttggtgggagctgtttccaaaaggatgttctgaatttggtttatctctgtgaggctctgaatttgccagaagtagctcgttattggcagcaggtcatagacatgaatgactaccagaggaggaggtttgcttcccggatcatagatagtctgtttaatacagtaactgataagaagatagctattttgggatttgcattcaaaaaggacactggtgatacaagagaatcttctagtatatatattagcaaatatttgatggatgaaggtgcacatctacatatatatgatccaaaagtacctagggaacaaatagttgtggatctttctcatccaggtgtttcagaggatgaccaagtgtcccggctcgtgaccatttccaaggatccatatgaagcatgtgatggtgcccatgctgttgttatttgcactgagtgggacatgtttaaggaattggattatgaacgcattcataaaaaaatgctaaagccagcctttatcttcgatggacggcgtgtcctggatgggctccacaatgaactacaaaccattggcttccagattgaaacaattggcaaaaaggtgtcttcaaagagaattccatatgctccttctggtgaaattccgaagtttagtcttcaagatccacctaacaagaaacctaaagtgtagagattgccatttttatttgtgatttttttttttttttggtacttcaggatagcaaatatctatctgctattaaatggtaaatgaaccaagtgtttttttttgttttttttttgagacagagtctcactgttgcccaggctggagtgcagtggtgcaatctcggctcactgcaagctctgcttcccaggttcacgccattctcctggctcagcctcccaagtagctgggactacaggcacccgccacagtgcctgggctaattttttgtatttttagtagagacagggtttcaccatgtgagccaggatggtctcaatctcctgaccttgtgaaccacccgtctcggcctcccaaagtgctgggattacaggtgtgagccaccacgcctgggcccatgaaccaagtgtttttaaggaaacaaaactatttttttaatcatcagatttatactagctatatggatattagcatatctggtaattatgaatctagaatttttttacatatttttataatactgttagctcagttattggatgagtgaaagataatcatgttggttttaatagtgtcaatttttgtaaaataaaaattaaacttcaaactctttactttataaattgtccataggccacactttaatatcacattataaagggaaggacagtcttcattcctcctggttattggtttgtttgtcattaaagatatattttgaatccatgaaattgctatgctaaacagcctttacatgtatggtctggttaaagttcctttgttccttttgttttaataaaatgtgtcactgattttttagctcaaaatcatcactgttaatttccagtcaccccaaatatggttaaaagatttttttttttaatcatgaagagaaaattagtagcatttctttctctccccattatttattggttttcctcactaatctttttttttttagtccaaaagccaaaaatatttatcttggttttacattttaatttccattcttaattgtaatttttttctttaaataaggaaaccaatataatctcatgtataaaaacttaaatattttacaagttacatatagcatcattctaaaataagaattttttttgttttctgtctgcttttttcttatgtctcttgttgagttttatattttcagtggttatttttgcttgtgttagatcattattaaaatatatccaatgtccctttgatacttgtgctctgctgagaatgtacagtttgcattaaacatcccaggtctcatccttcaggaattttgcagttcaatgagaagagggagacaaatataaagatgaggacagaagcatctctacagatgaaaattacataaataaaacattctccatcaacaaaa

SEQ ID NO: 62 - DNA, 3878 bp, Homo sapiens
  phosphatidylinositol-4-phosphate 5-kinase, type II beta transcript variant 1 (1)..(3878): LocusID: 8396; NM_003559
ttgcgggaaagagccaaaccctggcgttggggggcccgggcggggagcccctcccgcggtccacagcgacgcctgcccagccctcctccccttccggctccggcacggggccccgaggcgttcggaggccaggcgggtttctgtcaggcccggggaggaggggcgggcggggcggccgctgcctccccgggacgggccgtaccacgcggacggggaggacggggccaggggactgcagggcggctgcaccgcccgggggcggggtgcggagcgggccggcgggctccccggggcggggcgggagggcggggcgtggggcggacggaaccaccggggcggggtgggaggtaacgggacgggcgcgaccatggcgcggtgagggagcgggggtggggatcggtccgggggaggcctgaggccgctggcttgtgcgctgtctccgccgcccccctctttcgccgccgccgccgccgccccgggcatgtcgtccaactgcaccagcaccacggcggtggcggtggcgccgctcagcgccagcaagaccaagaccaagaagaagcatttcgtgtgccagaaagtgaagctattccgggccagcgagccgatcctcagcgtcctgatgtggggggtgaaccacacgatcaatgagctgagcaatgttcctgttcctgtcatgctaatgccagatgacttcaaagcctacagcaagatcaaggtggacaatcatctcttcaataaggagaacctgcccagccgctttaagtttaaggagtattgccccatggtgttccgaaaccttcgggagaggtttggaattgatgatcaggattaccagaattcagtgacgcgcagcgcccccatcaacagtgacagccagggtcggtgtggcacgcgtttcctcaccacctacgaccggcgctttgtcatcaagactgtgtccagcgaggacgtggcggagatgcacaacatcttaaagaaataccaccagtttatagtggagtgtcatggcaacacgcttttgccacagttcctgggcatgtaccgcctgaccgtggatggtgtggaaacctacatggtggttaccaggaacgtgttcagccatcggctcactgtgcatcgcaagtatgacctcaagggttctacggttgccagagaagcgagcgacaaggagaaggccaaggacttgccaacattcaaagacaatgacttcctcaatgaagggcagaagctgcatgtgggagaggagagtaaaaagaacttcctggagaaactgaagcgggacgttgagttcttggcacagctgaagatcatggactacagcctgctggtgggcatccacgacgtggaccgggcagagcaggaggagatggaggtggaggagcgggcagaggacgaggagtgtgagaatgatggggtgggtggcaacctactctgctcctatggcacacctccggacagccctggcaacctcctcagctttcctcggttctttggtcctggggaattcgacccctctgttgacgtctatgccatgaaaagccatgaaagttcccccaagaaggaggtgtatttcatggccatcattgatatcctcacgccatacgatacaaagaagaaagctgcacatgctgccaaaacggtgaaacacggggcaggggccgagatctcgactgtgaaccctgagcagtactccaaacgcttcaacgagtttatgtccaacatcctgacgtagttctcttctaccttcagccagagccagagagctggatatggggtcggggatcgggagttagggagaagggtgtatttgggctagatgggagggtgggagcagagtcgggtttgggagggctttagcaatgagactgcagcctgtgacaccgaaagagactttagctgaagaggagggggatgtgctgtgtgtgcacctgctcacaggatgtaaccccaccttctgcttacccttgattttttctccccatttgacacccaggttaaaaaggggttccctttttggtaccttgtaaccttttaagataccttggggctagagatgacttcgtgggtttatttgggttttgtttctgaaatttcattgctccaggtttgctatttataatcatatttcatcagcctacccaccctccccatctttgctgagctctcagttcccttcaattaaagagatacccggtagacccagcacaagggtccttccagaaccaagtgctatggatgccagattggagaggtcagacacctcgccctgctgcatttgctcttgtctggattaactttgtaatttatggagtattgtgcacaacttcctccacctttcccttggattcaagtgaaaactgttgcattattcctccatcctgtctggaatacaccaggtcaacaccagagatctcagatcagaatcagagatctcagaggggaataagttcatcctcatgggatggtgaggggcaggaaagcggctgggctcttggacacctggttctcagagaaccctgtgatgatcacccaagccccaggctgtcttagcccctggagttcagaagtcctctctgtaaagcctgcctcccactaggtcaagaggaactagagtacctttggatttatcaggaccctcatgtttaaatggttatttccctttgggaaaacttcagaaactgatgtatcaaatgaggccctgtgccctcgatctatttccttcttccttctgacctcctcccaggcactcttacttctagccgaactcttagctctgggcagatctccaagcgcctggagtgctttttagcagagacacctcgttaagctccgggatgaccttgtaggagatctgtctccctgtgcctggagagttacagccagcaaggtgcccccatcttagagtgtggtgtccaaacgtgaggtggcttcctagttacatgaggatgtgatccaggaaatccagtttggaggcttgatgtgggttttgacctggcctcagccttggggctgtttttccttgttgccccgctctagacttttagcagatctgcagcccacaggcttttttggaaggagtggcttcctgcaggtgttccacctgccttcggagcctgccacccaggccctcagaactgagccacaggctgctctggccaggagagaaacagctctgttgttctgcattgggggaggtacattcctgcatcttctcaccccctcaaccaggaactggggatttgggatgagatatggtcagacttgtagataaccccaaagatgtgaagatcgcttgtgaaaccattttgaatgaatagattggtttcctgtggctccctccaaacctggccaagcccagcttccgaagcaggaaccagcactgtctctgtgcctgactcacagcatataggtcaggaaagaatggagacggcattcttggacttcactggggctgctggattggatgggaaaccttctggaagaggcagatgggggtcaaaccactgccttggccccaggaaggggccataggtaggtctgaacaactgccgcaagaccactacatgacttagggaacttgaaaccaactggctcatggagaaaacaaatttgacttgggaaagggattatgtaggaataatgtttggacttgatttccccacgtcataatgaagaatggaagtttggatctgctcctcgtcaggcgcagcatctctgaagcttggaaagctgtcttccagcagcctccgtggcctcgggttcctaccggcttctctgcatttggtctgctgatcatgttgccataatgtgtatggaaagtgtaacacattcttactggttaaagacgactaccaggtatctaacttgtttaacattga

SEQ ID NO: 63 - DNA, 1430 bp, Homo sapiens
  phosphatidylinositol-4-phosphate 5-kinase, type II,beta transcript variant 2 (1)..(1430): LocusID: 8396; NM_138687
ttgcgggaaagagccaaaccctggcgttggggggcccgggcggggagcccctcccgcggtccacagcgacgcctgcccagccctcctccccttccggctccggcacggggccccgaggcgttcggaggccaggcgggtttctgtcaggcccggggaggaggggcgggcggggcggccgctgcctccccgggacgggccgtaccacgcggacggggaggacggggccaggggactgcagggcggctgcaccgcccgggggcggggtgcggagcgggccggcgggctccccggggcggggcgggagggcggggcgtggggcggacggaaccaccggggcggggtgggaggtaacgggacgggcgcgaccatggcgcggtgagggagcgggggtggggatcggtccgggggaggcctgaggccgctggcttgtgcgctgtctccgccgcccccctctttcgccgccgccgccgccgccccgggcatgtcgtccaactgcaccagcaccacggcggtggcggtggcgccgctcagcgccagcaagaccaagaccaagaagaagcatttcgtgtgccagaaagtgaagctattccgggccagcgagccgatcctcagcgtcctgatgtggggggtgaaccacacgatcaatgagctgagcaatgttcctgttcctgtcatgctaatgccagatgacttcaaagcctacagcaagatcaaggtggacaatcatctcttcaataaggagaacctgcccagccgctttaagtttaaggagtattgccccatggtgttccgaaaccttcgggagaggtttggaattgatgatcaggattaccagaattcagtgacgcgcagcgcccccatcaacagtgacagccagggtcggtgtggcacgcgtttcctcaccacctacgaccggcgctttgtcatcaagactgtgtccagcgaggacgtggcggagatgcacaacatcttaaagaaataccaccagtttatagtggagtgtcatggcaacacgcttttgccacagttcctgggcatgtaccgcctgaccgtggatggtgtggaaacctacatggtggttaccaggaacgtgttcagccatcggctcactgtgcatcgcaagtatgacctcaagggttctacggttgccagagaagcgagcgacaaggagaaggccaaggacttgccaacattcaaagacaatgacttcctcaatgaagggcagaagctgcatgtgggagaggagagtaaaaagaacttcctggagaaactgaagcgggacgttgaggagattctcgttctgtccccaggctggagaatcgcttgaacccaggaggcggaggttgcggtgaccctccagcttgggcaacatgttatgaatgaaactccatctcaaaaaataaaaaaaaaaaaaggaagcaaaaaaaaaa

SEQ ID NO: 64 - DNA, 1750 bp, Homo sapiens
  MAP kinase interacting serine/threonine kinase 2 sequence1 (1)..(1750): LocusID: 2872; NM_017572
cagcggcggtggcccaggtagaggggtccgcgctggcggcggcggcggcgctgttccccgcgcggtccgcggagcggggtccgggctgcgcgacgtggggcggcggcggcactgcggccccggcccaagcccgaccccgggtcccctcctcggccgccccccgcccggccgcccgccctcgggcctccccccgggccctcggtcccctcccccgctggcggggcccggacagaagatggtgcagaagaaaccagccgaacttcagggtttccaccgttcgttcaaggggcagaaccccttcgagctggccttctccctagaccagcccgaccacggagactctgactttggcctgcagtgctcagcccgccctgacatgcccgccagccagcccattgacatcccggacgccaagaagaggggcaagaagaagaagcgcggccgggccaccgacagcttctcgggcaggtttgaagacgtctaccagctgcaggaagatgtgctgggggagggcgctcatgcccgagtgcagacctgcatcaacctgatcaccagccaggagtacgccgtcaagatcattgagaagcagccaggccacattcggagcagggttttcagggaggtggagatgctgtaccagtgccagggacacaggaacgtcctagagctgattgagttcttcgaggaggaggaccgcttctacctggtgtttgagaagatgcggggaggctccatcctgagccacatccacaagcgccggcacttcaacgagctggaggccagcgtggtggtgcaggacgtggccagcgccttggactttctgcataacaaaggcatcgcccacagggacctaaagccggaaaacatcctctgtgagcaccccaaccaggtctcccccgtgaagatctgtgacttcgacctgggcagcggcatcaaactcaacggggactgctcccctatctccaccccggagctgctcactccgtgcggctcggcggagtacatggccccggaggtagtggaggccttcagcgaggaggctagcatctacgacaagcgctgcgacctgtggagcctgggcgtcatcttgtatatcctactcagcggctacccgcccttcgtgggccgctgtggcagcgactgcggctgggaccgcggcgaggcctgccctgcctgccagaacatgctgtttgagagcatccaggagggcaagtacgagttccccgacaaggactgggcccacatctcctgcgctgccaaagacctcatctccaagctgctggtccgtgacgccaagcagaggctgagtgccgcccaagtcctgcagcacccctgggttcaggggtgcgccccggagaacaccttgcccactcccatggtcctgcagaggtgggacagtcacttcctcctccctccccacccctgtcgcatccacgtgcgacctggaggactggtcagaaccgttactgtgaatgagtgaagatcctggaggaccctgggccccaggccagctcccatcgctgggggacggtgaacggccatgtgttaatgttacgatgtttttaaaagacaaaaaaaaaaaaaaaacctcaaaagtttttttaaagtgggggaaaaacatccaagcactttaattccaatgtaccaggtgaactgacggagctcagaagttttcctttacaccaactgtcaatgccggaattttgtattctgttttgtaaagatttaataaaagtcaaaaaacttgcaa

SEQ ID NO: 65 - DNA, 3790 bp, Homo sapiens
  MAP kinase interacting serine/threonine kinase 2 sequence 2 (1)..(3790): LocusID: 2872; NM_199054
cagcggcggtggcccaggtagaggggtccgcgctggcggcggcggcggcgctgttccccgcgcggtccgcggagcggggtccgggctgcgcgacgtggggcggcggcggcactgcggccccggcccaagcccgaccccgggtcccctcctcggccgccccccgcccggccgcccgccctcgggcctccccccgggccctcggtcccctcccccgctggcggggcccggacagaagatggtgcagaagaaaccagccgaacttcagggtttccaccgttcgttcaaggggcagaaccccttcgagctggccttctccctagaccagcccgaccacggagactctgactttggcctgcagtgctcagcccgccctgacatgcccgccagccagcccattgacatcccggacgccaagaagaggggcaagaagaagaagcgcggccgggccaccgacagcttctcgggcaggtttgaagacgtctaccagctgcaggaagatgtgctgggggagggcgctcatgcccgagtgcagacctgcatcaacctgatcaccagccaggagtacgccgtcaagatcattgagaagcagccaggccacattcggagcagggttttcagggaggtggagatgctgtaccagtgccagggacacaggaacgtcctagagctgattgagttcttcgaggaggaggaccgcttctacctggtgtttgagaagatgcggggaggctccatcctgagccacatccacaagcgccggcacttcaacgagctggaggccagcgtggtggtgcaggacgtggccagcgccttggactttctgcataacaaaggcatcgcccacagggacctaaagccggaaaacatcctctgtgagcaccccaaccaggtctcccccgtgaagatctgtgacttcgacctgggcagcggcatcaaactcaacggggactgctcccctatctccaccccggagctgctcactccgtgcggctcggcggagtacatggccccggaggtagtggaggccttcagcgaggaggctagcatctacgacaagcgctgcgacctgtggagcctgggcgtcatcttgtatatcctactcagcggctacccgcccttcgtgggccgctgtggcagcgactgcggctgggaccgcggcgaggcctgccctgcctgccagaacatgctgtttgagagcatccaggagggcaagtacgagttccccgacaaggactgggcccacatctcctgcgctgccaaagacctcatctccaagctgctggtccgtgacgccaagcagaggctgagtgccgcccaagtcctgcagcacccctgggttcaggggtgcgccccggagaacaccttgcccactcccatggtcctgcagaggaacagctgtgccaaagacctcacgtccttcgcggctgaggccattgccatgaaccggcagctggcccagcacgacgaggacctggctgaggaggaggccgcggggcagggccagcccgtcctggtccgagctacctcacgctgcctgcagctgtctccaccctcccagtccaagctggcgcagcggcggcaaagggccagtctgtcctcggccccagtggtcctggtgggagaccacgcctgaccctcccatctcccctctgtacataggtcacccgtcccccaatcaaatctaaaggttttttaagctatcgccagccggtgtccagcgggctgcccctcctctgcctggattcccaggcactaagctcagctgaggggggtgttttatagaaggtttttgcttttgggttttttttttcctgtttccacccctccccgttattttttcctttggatggttaaaagcattgcaggcacccgggaaggtgagcagagggtaggtgggtgggcttgtcccctccccggtcccccgccctgctcacctctactatgaaggtgcccccaggtcacctgtgctgcccgccatctgcccacgtggcttgcagtgactcaggagagcaggcccacagcgtttgccatcttgcagagctggggaggggcacaggaccctgccctcgtgttccctcccagcccgcagtatttcagggacaggctcttcccctctatccctcaccctgagagcacccctggtggcttggttggggaagggaggggctgcctgtctctggaggtgtcaggcaggcaggtggcaggcagctcacccacccaccccatgggatcccccagcccttcacccgcgcctgccttgtccccatgatagttgacaatcggggcttcctgcaaggcccgtctgtctgtccaggactcctggtggccagattcggcctccgaccttgaccttaaactgcagctgaccccaggggctcgccgctgcccctcccctccacaccaaggcctgagacagcaggagccccgcctggcccgaagccgtttccaccgcagcaggcagaggggctggacaggcactgtcagccaatgtggggggtcctgaagacacccccttggggcacccgagtgccccttctcagggctcagtctgaccgtagccacgtcctgcctcgcgccgcccctcgggcctgacctggaagctccgtcagctccgtccttgtccttagagctgagcccagaccccggggtctggccgaatcctcacccccagggcagtgtttttggtctgccaccttcaggaaaacggctgcggcctcggcctcccttcgggcacccaggaatgcgggggtctgctcagtccccccaccctccatgctccaacccccgggggctgcggagcctgctgccccctccccgcgggtggggacgttctatgcaatacagggttccactttagaagtgcgcgcggctagggtcaccgcccgcccttcccggcgcagcccccgagctccacagctggggcagcccctctggcttctaaatccgcggtcgggattcttcctcctgtttagttttttagtttttccttaaaaaaaaacaacacatcgatggactttgcttccctgttcttgaagaatacttgaatgtcggggggcctgggggtgggggcctcggagaccgtctgcctggccctgctgcccctcctgaatctcgtatgatggtcacagtccggtggccgtgggggtgctctgccttccctggtccccactgcccatatctgtggactgccccttccaaagacccctggggggggtggggcattccgcccacccctttcccccatcacttctcgcctgtcagtgattccatgtttcgtaacgggggattctctgcctttttgtatcaaagaacaagcaaatggacccccgcccgctgcaggcgcccatagccatcgggtctctaaagctgagtggctagcagcgtttgtttgtttgtttttttttttttttctgaaggtgggacagtcacttcctcctccctccccacccctgtcgcatccacgtgcgacctggaggactggtcagaaccgttactgtgaatgagtgaagatcctggaggaccctgggccccaggccagctcccatcgctgggggacggtgaacggccatgtgttaatgttacgatgtttttaaaagacaaaaaaaaaaaaaaaacctcaaaagtttttttaaagtgggggaaaaacatccaagcactttaattccaatgtaccaggtgaactgacggagctcagaagttttcctttacaccaactgtcaatgccggaattttgtattctgttttgtaaagatttaataaaagtcaaaaaacttgcaaaaaaaaaaaaaaa

SEQ ID NO: 66 - DNA, 2443 bp, Homo sapiens
  carboxypeptidase E (1)..(2443): LocusID: 1363; NM_001873
aaatggcgtgcccgtctctccgccggccccctgcctcgcagtggtttctcctgcagctcccctgggctccgcggccagtagtgcagcccgtggagccgcggctttgcccgtctcctctgggtggccccagtgcgcgggctgacactcattcagccggggaaggtgaggcgagtagaggctggtgcggaacttgccgcccccagcagcgccggcgggctaagcccagggccgggcagacaaaagaggccgcccgcgtaggaaggcacggccggcggcggcggagcgcagcgatggccgggcgagggggcagcgcgctgctggctctgtgcggggcactggctgcctgcgggtggctcctgggcgccgaagcccaggagcccggggcgcccgcggcgggcatgaggcggcgccggcggctgcagcaagaggacggcatctccttcgagtaccaccgctaccccgagctgcgcgaggcgctcgtgtccgtgtggctgcagtgcaccgccatcagcaggatttacacggtggggcgcagcttcgagggccgggagctcctggtcatcgagctgtccgacaaccctggcgtccatgagcctggtgagcctgaatttaaatacattgggaatatgcatgggaatgaggctgttggacgagaactgctcattttcttggcccagtacctatgcaacgaataccagaaggggaacgagacaattgtcaacctgatccacagtacccgcattcacatcatgccttccctgaacccagatggctttgagaaggcagcgtctcagcctggtgaactcaaggactggtttgtgggtcgaagcaatgcccagggaatagatctgaaccggaactttccagacctggataggatagtgtacgtgaatgagaaagaaggtggtccaaataatcatctgttgaaaaatatgaagaaaattgtggatcaaaacacaaagcttgctcctgagaccaaggctgtcattcattggattatggatattccttttgtgctttctgccaatctccatggaggagaccttgtggccaattatccatatgatgagacgcggagtggtagtgctcacgaatacagctcctccccagatgacgccattttccaaagcttggcccgggcatactcttctttcaacccggccatgtctgaccccaatcggccaccatgtcgcaagaatgatgatgacagcagctttgtagatggaaccaccaacggtggtgcttggtacagcgtacctggagggatgcaagacttcaattaccttagcagcaactgttttgagatcaccgtggagcttagctgtgagaagttcccacctgaagagactctgaagacctactgggaggataacaaaaactccctcattagctaccttgagcagatacaccgaggagttaaaggatttgtccgagaccttcaaggtaacccaattgcgaatgccaccatctccgtggaaggaatagaccacgatgttacatccgcaaaggatggtgattactggagattgcttatacctggaaactataaacttacagcctcagctccaggctatctggcaataacaaagaaagtggcagttccttacagccctgctgctggggttgattttgaactggagtcattttctgaaaggaaagaagaggagaaggaagaattgatggaatggtggaaaatgatgtcagaaactttaaatttttaaaaaggcttctagttagctgctttaaatctatctatataatgtagtatgatgtaatgtggtcttttttttagattttgtgcagttaatacttaacattgatttattttttaatcatttaaatattaatcaactttccttaaaataaatagcctcttaggtaaaaatataagaacttgatatatttcattctcttatatagtattcattttcctacctatattacacaaaaaagtatagaaaagatttaagtaattttgccatcctaggcttaaatgcaatattcctggtattatttacaatgcagaattttttgagtaattctagctttcaaaaattagtgaagttcttttactgtaattggtgacaatgtcacataatgaatgctattgaaaaggttaacagatacagctcggagttgtgagcactctactgcaagacttaaatagttcagtataaattgtcgtttttttcttgtgctgactaactataagcatgatcttgttaatgcatttttgatgggaagaaaaggtacatgtttacaaagaggttttatgaaaagaataaaaattgacttcttgcttgtacatataggagcaatactattatattatgtagtccgttaacactacttaaaagtttagggttttctcttggttgtagagtggcccagaattgcattctgaatgaataaaggttaaaaaaaaatccccagtgaaaaaaaa

SEQ ID NO: 67 - DNA, 1633 bp, Homo sapiens
  carboxypeptidase A3 (mast cell) (1)..(1633): LocusID: 1359; NM_001870
aaagaagaaccatgaggctcatcctgcctgtgggtttgattgctaccactcttgcaattgctcctgtccgctttgacagggagaaggtgttccgcgtgaagccccaggatgaaaaacaagcagacatcataaaggacttggccaaaaccaatgagcttgacttctggtatccaggtgccacccaccacgtagctgctaatatgatggtggatttccgagttagtgagaaggaatcccaagccatccagtctgccttggatcaaaataaaatgcactatgaaatcttgattcatgatctacaagaagagattgagaaacagtttgatgttaaagaagatatcccaggcaggcacagctacgcaaaatacaataattgggaaaagattgtggcttggactgaaaagatgatggataagtatcctgaaatggtctctcgtattaaaattggatctactgttgaagataatccactatatgttctgaagattggggaaaagaatgaaagaagaaaggctatttttatggattgtggcattcacgcacgagaatgggtctccccagcattctgccagtggtttgtctatcaggcaaccaaaacttatgggagaaacaaaattatgaccaaactcttggaccgaatgaatttttacattcttcctgtgttcaatgttgatggatatatttggtcatggacaaagaaccgcatgtggagaaaaaatcgttccaagaaccaaaactccaaatgcatcggcactgacctcaacaggaattttaatgcttcatggaactccattcctaacaccaatgacccatgtgcagataactatcggggctctgcaccagagtccgagaaagagacgaaagctgtcactaatttcattagaagccacctgaatgaaatcaaggtttacatcaccttccattcctactcccagatgctattgtttccctatggatatacatcaaaactgccacctaaccatgaggacttggccaaagttgcaaagattggcactgatgttctatcaactcgatatgaaacccgctacatctatggcccaatagaatcaacaatttacccgatatcaggttcttctttagactgggcttatgacctgggcatcaaacacacatttgcctttgagctccgagataaaggcaaatttggttttctccttccagaatcccggataaagccaacgtgcagagagaccatgctagctgtcaaatttattgccaagtatatcctcaagcatacttcctaaagaactgccctctgtttggaataagccaattaatccttttttgtgcctttcatcagaaagtcaatcttcagttatccccaaatgcagcttctatttcacctgaatccttctcttgctcatttaagtcccatgttactgctgtttgcttttacttactttcagtagcaccataacgaagtagctttaagtgaaaccttttaactacctttctttgctccaagtgaagtttggacccagcagaaagcattattttgaaaggtgatatacagtggggcacagaaaacaaatgaaaaccctcagtttctcacagattttcaccatgtggcttcatcaatttatgtgctaatacaataaaataaaatgcactt

SEQ ID NO: 68 - DNA, 1516 bp, Homo sapiens
  solute carrier family 38, member 6 (1)..(1516): LocusID: 145389; NM_153811
gtacggaatgccggaagggccgggctcaaagctccgcctctggcgcgaccgacgactggagcgcagggcaggggtagaggctcgtagatggaactggtagtcagctggagagcagcatggaggcgtcctgggggagcttcaacgctgagcggggctggtatgtctctgtccagcagcctgaagaagcggaggccgaagagttgagtccgttgctaagcaacgaacttcacagacagcgatccccaggtgtttcatttggtttatcagtgtttaatttgatgaatgccatcatgggaagtggcatccttggcttagcttatgttatggctaataccggtgtctttggatttagcttcttgctgctgacagttgctctcctggcttcttactcagtccatcttctgcttagtatgtgtattcagacagctgtaacatcttatgaagatcttggactctttgcatttggattacctggaaagttggtggtggcaggcaccataataattcagaatattggagctatgtcatcttatcttttaattattaaaacagagcttcctgctgctattgcagaatttttgactggagactatagtagatattggtatcttgatggacaaacactactaataatcatatgtgttggcattgtgttccctcttgcacttcttcccaaaataggctttcttggctacacaagtagtttatcatttttctttatgatgttctttgctcttgtggtaataattaaaaaatggtccatcccttgtcctctgacattaaattatgtagagaaaggcttccagatttcaaatgttacagatgattgtaagccaaagctctttcatttctccaaagagagtgcttatgccttaccaaccatggctttttcatttctctgccatacctcaatattgcccatatactgtgaacttcaaagtccttcaaagaaaagaatgcagaatgttaccaatacagcaattgctttaagttttctcatttattttatatctgcactctttgggtacctcactttttatgacaaagtggagtcagaattactaaaaggttatagtaaatacttatcacatgatgttgttgtcatgactgtgaagttatgcatactatttgctgtgcttttgacagtccctctaatccacttccctgccagaaaagctgtaacaatgatgtttttctccaattttccattctcatggattcgccattttttgatcactctagcactcaatattatcatcgttttacttgcaatatatgttcctgacattagaaatgtatttggtgtagttggtgccagtacatcaacatgtttgatttttatattcccaggactattttatcttaaacttagcagagaggattttctgtcatggaaaaagcttggggcattcgttttgctcatctttggaattttggttgggaattttagtttagcactcatcatttttgattggattaataaataaaagaaatattttcctacttcttacaagaa

SEQ ID NO: 69 - DNA, 3630 bp, Homo sapiens
  very low density lipoprotein receptor (1)..(3630): LocusID: 7436; NM_003383
ctctgcgggccgcgggtgcgggtcgtcgctaccggctctctccgttctgtgctctcttctgctctcggctccccaccccctctcccttccctcctctccccttgcctcccctcctctgcagcgcctgcattattttctgcccgcagctcggcttgcactgctgctgcagcccggggaggtggctgggtgggtggggaggagactgtgcaagttgtaggggagggggtgccctcttcttccccgctcccttccccagccaagtggttcccctccttctccccctttcccctcccagcccccaccttcttcctctttcggaagggctggtaacttgtcgtgcggagcgaacggcggcggcggcggcggcggcggcaccatccaggcgggcaccatgggcacgtccgcgctctgggccgtctggctgctgctcgcgctgtgctgggcgccccgggagagcggcgccaccggaaccgggagaaaagccaaatgtgaaccctcccaattccagtgcacaaatggtcgctgtattacgctgttgtggaaatgtgatggggatgaagactgtgttgacggcagtgatgaaaagaactgtgtaaagaagacgtgtgctgaatctgacttcgtgtgcaacaatggccagtgtgttcccagccgatggaagtgtgatggagatcctgactgcgaagatggttcagatgaaagcccagaacagtgccatatgagaacatgccgcatacatgaaatcagctgtggcgcccattctactcagtgtatcccagtgtcctggagatgtgatggtgaaaatgattgtgacagtggagaagatgaagaaaactgtggcaatataacatgtagtcccgacgagttcacctgctccagtggccgctgcatctccaggaactttgtatgcaatggccaggatgactgcagcgatggcagtgatgagctggactgtgccccgccaacctgtggcgcccatgagttccagtgcagcacctcctcctgcatccccatcagctgggtatgcgacgatgatgcagactgctccgaccaatctgatgagtccctggagcagtgtggccgtcagccagtcatacacaccaagtgtccagccagcgaaatccagtgcggctctggcgagtgcatccataagaagtggcgatgtgatggggaccctgactgcaaggatggcagtgatgaggtcaactgtccctctcgaacttgccgacctgaccaatttgaatgtgaggatggcagctgcatccatggcagcaggcagtgtaatggtatccgagactgtgtcgatggttccgatgaagtcaactgcaaaaatgtcaatcagtgcttgggccctggaaaattcaagtgcagaagtggagaatgcatagatatcagcaaagtatgtaaccaggagcaggactgcagggactggagtgatgagcccctgaaagagtgtcatataaacgaatgcttggtaaataatggtggatgttctcatatctgcaaagacctagttataggctacgagtgtgactgtgcagctgggtttgaactgatagataggaaaacctgtggagatattgatgaatgccaaaatccaggaatctgcagtcaaatttgtatcaacttaaaaggcggttacaagtgtgaatgtagtcgtgcctatcaaatggatcttgctactggcgtgtgcaaggcagtaggcaaagagccaagtctgatcttcactaatcgaagagacatcaggaagattggcttagagaggaaagaatatatccaactagttgaacagctaagaaacactgtggctctcgatgctgacattgctgcccagaaactattctgggccgatctaagccaaaaggctatcttcagtgcctcaattgatgacaaggttggtagacatgttaaaatgatcgacaatgtctataatcctgcagccattgctgttgattgggtgtacaagaccatctactggactgatgcggcttctaagactatttcagtagctaccctagatggaaccaagaggaagttcctgtttaactctgacttgcgagagcctgcctccatagctgtggacccactgtctggctttgtttactggtcagactggggtgaaccagctaaaatagaaaaagcaggaatgaatggattcgatagacgtccactggtgacagcggatatccagtggcctaacggaattacacttgaccttataaaaagtcgcctctattggcttgattctaagttgcacatgttatccagcgtggacttgaatggccaagatcgtaggatagtactaaagtctctggagttcctagctcatcctcttgcactaacaatatttgaggatcgtgtctactggatagatggggaaaatgaagcagtctatggtgccaataaattcactggatcagagcatgccactctagtcaacaacctgaatgatgcccaagacatcattgtctatcatgaacttgtacagccatcaggtaaaaattggtgtgaagaagacatggagaatggaggatgtgaatacctatgcctgccagcaccacagattaatgatcactctccaaaatatacctgttcctgtcccagtgggtacaatgtagaggaaaatggccgagactgtcaaagtactgcaactactgtgacttacagtgagacaaaagatacgaacacaacagaaatttcagcaactagtggactagttcctggagggatcaatgtgaccacagcagtatcagaggtcagtgttcccccaaaagggacttctgccgcatgggccattcttcctctcttgctcttagtgatggcagcagtaggtggctacttgatgtggcggaattggcaacacaagaacatgaaaagcatgaactttgacaatcctgtgtacttgaaaaccactgaagaggacctctccatagacattggtagacacagtgcttctgttggacacacgtacccagcaatatcagttgtaagcacagatgatgatctagcttgacttctgtgacaaatgttgacctttgaggtctaaacaaataatacccccgtcggaatggtaaccgagccagcagctgaagtctctttttcttcctctcggctggaagaacatcaagatacctttgcgtggatcaagcttgctgtacttgaccgtttttatattacttttgtaaatattcttgtccacattctacttcagctttggatgtggttaccgagtatctgtaacccttgaatttctagacagtattgccacctctggccaaatatgcactttccctagaaagccatattccagcagtgaaacttgtgctatagtgtataccacctgtacatacattgtataggccatctgtaaatatcccagagaacaatcactattcttaagcactttgaaaatatttctatgtaaattattgtaaactttttcaatggttgggacaatggcaataggacaaaacgggttactaagatgaaattgccaaaaaaatttataaactaattttggtacgtatgaatgatatctttgacctcaatggaggtttgcaaagactgagtgttcaaactactgtacattttttttcaagtgctaaaaaattaaaccaagcagcttaaaaa

SEQ ID NO: 70 - DNA, 924 bp, Homo sapiens
  cathepsin G (1)..(924): LocusID: 1511; NM_001911
gcacagcagcaactgactgggcagcctttcaggaaagatgcagccactcctgcttctgctggcctttctcctacccactggggctgaggcaggggagatcatcggaggccgggagagcaggccccactcccgcccctacatggcgtatcttcagatccagagtccagcaggtcagagcagatgtggagggttcctggtgcgagaagactttgtgctgacagcagctcattgctggggaagcaatataaatgtcaccctgggcgcccacaatatccagagacgggaaaacacccagcaacacatcactgcgcgcagagccatccgccaccctcaatataatcagcggaccatccagaatgacatcatgttattgcagctgagcagaagagtcagacggaatcgaaacgtgaacccagtggctctgcctagagcccaggagggactgagacccgggacgctgtgcactgtggccggctggggcagggtcagcatgaggaggggaacagatacactccgagaggtgcagctgagagtgcagagggataggcagtgcctccgcatcttcggttcctacgacccccgaaggcagatttgtgtgggggaccggcgggaacggaaggctgccttcaagggggattccggaggccccctgctgtgtaacaatgtggcccacggcatcgtctcctatggaaagtcgtcaggggttcctccagaagtcttcaccagggtctcaagtttcctgccctggataaggacaacaatgagaagcttcaaactgctggatcagatggagacccccctgtgactgactcttcttctcggggacacaggccagctccacagtgttgccagagccttaataaacgtccacagagtataaataaccaattcctcatttgttcattaaacgtcattcagtactta

SEQ ID NO: 71 - DNA, 3208 bp, Homo sapiens
  galactokinase 2 (GALK2), transcript variant 2 (1)..(3208): LocusID: 2585; NM_001001556
ggttggtgccttagcaactaaagctggcaactgggacatcgtccggtgctgcaggtctcagccgaagggcgtcggaaactgcgctcgcatcgagcagtttccagcctcctgggtaaaggagcagtctcctcccttgcttgggactctggacgcatctcattccggtgaaagtaagggacagcttaggaccagaagcctttcgcggagaaaaggctgacatgcccgtcctatatgacaggttactgaagctaaaggagatgtttaactccaagtttggatctattcccaagttttatgttcgagcaccaggaagagtcaacataataggagagcatatagattattgtggatattctgttcttcctatggctgtagaacaagatgtgctaatagctgtagaacctgtgaaaacgtacgctctccaactggccaatacaaatcccttgtatccggacttcagtactagtgctaataacatccagattgataaaaccaagcctttgtggcacaactatttcttatgtggacttaaaggaattcaggaacactttggtcttagtaacctgactggaatgaactgcctggtagatggaaatatcccaccaagttctggcctctccagctccagtgctttggtctgttgtgctggcttggtgacgctcacagtgctgggaaggaatctatccaaggtggaacttgcagaaatctgtgccaagagtgagcgttacattggcactgaaggaggaggcatggaccagtctatatcatttcttgcagaagaaggaactgccaagttgatagaatttagtcctctgagggcaaccgatgtaaaactcccaagtggagcagtgtttgtgattgccaacagttgtgtggagatgaataaggcagcaacttcccatttcaatatcagggtgatggagtgtcggctggctgcgaagctcctggctaaatacaaaagcttgcaatgggacaaagtactgaggctggaggaggtgcaggctaaactagggattagtctagaagaaatgctgttggtcacagaagatgcccttcatcctgaaccctataaccctgaggagatctgcaggtgtctgggaattagcctggaggaactccgaacccaaatcctgagtccaaacactcaagatgtgctcatcttcaaactctatcagcgggcaaagcatgtgtacagcgaggctgcgcgagtgctccagtttaagaagatatgtgaagaagcacctgaaaacatggtccagctgctgggagagttgatgaaccagagccacatgagctgccgggacatgtatgagtgcagctgccccgagctggatcagctggtggacatctgtcggaagtttggggctcaagggtcacgacttactggagcaggatggggaggctgcacagtatcaatggtacctgcggacaagctgcccagctttctagcaaatgtgcacaaagcttattaccagaggagtgatggaagcttagcaccggagaagcaaagtttgtttgctaccaaacctggaggtggggctttggttttgcttgaggcctgaaaaaatgtaaaaagtctgagagaaactacttagggcacttaggaattggcaggactttctgtgccacagtaaattaatcttccttctgttttgtattatgatgaacggttgctattatatcaagatatattttcaaagaaatggttgaaagctctctatgcttcataatgattctttttccatcttaaaatatggttttactattaagagccaagatcatgcttggacagatcttttaagaataacttactgagatttattgatttgaagattttaaagatgaatggtaaaacacactcttaatactgattacatggattggacttgaattaaatatattgttacaattaaactgataccactgaattgtatgcattattcttgaatagagttcatttctggtttctcttagtattcttcttcctcaaagttgtagttgtctgttgatgatggtgatgatgatgatgatgacgatagtgatgccacacattctctctcaatttcagcttcggaacgctatgaaaataatacatgattaaagtttcacagatcttcttggacattgtataattgaatttgaatgtgagatttctccagttatcaagagactaaggatttttttttttttttgacaaaaggaggatacaggaagaaaattcagactcatttgaatatttgtaaaccatgtaatatataaataaccactttcaattcttttggccctgagctatctccattacttaatagaaaaacttagataaaaaacactttaagactcttctattcacattgaaataaagaattatctagatgataattcagataattcagtttgttcatagaattactttcttatcactctttttctactactttttctcaaatacctctctaatccaagaggcacttccaagaaattccacacattccttatatcccttttttgcttgtctagcaaagcttgtttgtatatatgcaccccattgtaaagcaggtatgcaggtatgtgggtgaaagtgactatgaaaagacttaatgaattctgggatttgtaatggtattgatgggtatctctgtatgtatatcaagagtgggcagaaatgtttggctggtgatggcaaatgactggctttctcttgtggatggactataggaagcactttctgaattatgtaatgatttggaccaaaaagtattttgctgaaatactcaggtaattgagatagcaatggttttatggcatgaattatccaaaaaaatatcagaattacttattattctgtgatttcattagctcattaatgtttaactcacagattgggcatcaccatctagaatttcagtttaagggaggcctgcgcaaagctagttttatttcttaaaggataacagtcatacatagaatactaggaaagccaatattctatttaaaaataaacttctgatgcattttcattcttagcagaaaggtaaatgcttgagaaagcttgagtcaaatttgttaaaagaattttgagttctataaatccaaaaatctgaaacctgaatttatttaaatttataatcctttattttttaataccgtgccattttccacaaaggatttgtggttggtatataattctttaaagatacctggatcagtg

SEQ ID NO: 72 - DNA, 3121 bp, Homo sapiens
  galactokinase 2 (GALK2), transcript variant 1 (1)..(3121): LocusID: 2586; NM_002044
ccggaagaaaacggctcctgtcacagaagtctcgtgattgctctgggagctttgcttagacacttgaaactacaggagaaagaaggatctagcgaaatatggctacagagagccctgctacgcgtcgggtccaggtggcagaacatcctaggttactgaagctaaaggagatgtttaactccaagtttggatctattcccaagttttatgttcgagcaccaggaagagtcaacataataggagagcatatagattattgtggatattctgttcttcctatggctgtagaacaagatgtgctaatagctgtagaacctgtgaaaacgtacgctctccaactggccaatacaaatcccttgtatccggacttcagtactagtgctaataacatccagattgataaaaccaagcctttgtggcacaactatttcttatgtggacttaaaggaattcaggaacactttggtcttagtaacctgactggaatgaactgcctggtagatggaaatatcccaccaagttctggcctctccagctccagtgctttggtctgttgtgctggcttggtgacgctcacagtgctgggaaggaatctatccaaggtggaacttgcagaaatctgtgccaagagtgagcgttacattggcactgaaggaggaggcatggaccagtctatatcatttcttgcagaagaaggaactgccaagttgatagaatttagtcctctgagggcaaccgatgtaaaactcccaagtggagcagtgtttgtgattgccaacagttgtgtggagatgaataaggcagcaacttcccatttcaatatcagggtgatggagtgtcggctggctgcgaagctcctggctaaatacaaaagcttgcaatgggacaaagtactgaggctggaggaggtgcaggctaaactagggattagtctagaagaaatgctgttggtcacagaagatgcccttcatcctgaaccctataaccctgaggagatctgcaggtgtctgggaattagcctggaggaactccgaacccaaatcctgagtccaaacactcaagatgtgctcatcttcaaactctatcagcgggcaaagcatgtgtacagcgaggctgcgcgagtgctccagtttaagaagatatgtgaagaagcacctgaaaacatggtccagctgctgggagagttgatgaaccagagccacatgagctgccgggacatgtatgagtgcagctgccccgagctggatcagctggtggacatctgtcggaagtttggggctcaagggtcacgacttactggagcaggatggggaggctgcacagtatcaatggtacctgcggacaagctgcccagctttctagcaaatgtgcacaaagcttattaccagaggagtgatggaagcttagcaccggagaagcaaagtttgtttgctaccaaacctggaggtggggctttggttttgcttgaggcctgaaaaaatgtaaaaagtctgagagaaactacttagggcacttaggaattggcaggactttctgtgccacagtaaattaatcttccttctgttttgtattatgatgaacggttgctattatatcaagatatattttcaaagaaatggttgaaagctctctatgcttcataatgattctttttccatcttaaaatatggttttactattaagagccaagatcatgcttggacagatcttttaagaataacttactgagatttattgatttgaagattttaaagatgaatggtaaaacacactcttaatactgattacatggattggacttgaattaaatatattgttacaattaaactgataccactgaattgtatgcattattcttgaatagagttcatttctggtttctcttagtattcttcttcctcaaagttgtagttgtctgttgatgatggtgatgatgatgatgatgacgatagtgatgccacacattctctctcaatttcagcttcggaacgctatgaaaataatacatgattaaagtttcacagatcttcttggacattgtataattgaatttgaatgtgagatttctccagttatcaagagactaaggatttttttttttttttgacaaaaggaggatacaggaagaaaattcagactcatttgaatatttgtaaaccatgtaatatataaataaccactttcaattcttttggccctgagctatctccattacttaatagaaaaacttagataaaaaacactttaagactcttctattcacattgaaataaagaattatctagatgataattcagataattcagtttgttcatagaattactttcttatcactctttttctactactttttctcaaatacctctctaatccaagaggcacttccaagaaattccacacattccttatatcccttttttgcttgtctagcaaagcttgtttgtatatatgcaccccattgtaaagcaggtatgcaggtatgtgggtgaaagtgactatgaaaagacttaatgaattctgggatttgtaatggtattgatgggtatctctgtatgtatatcaagagtgggcagaaatgtttggctggtgatggcaaatgactggctttctcttgtggatggactataggaagcactttctgaattatgtaatgatttggaccaaaaagtattttgctgaaatactcaggtaattgagatagcaatggttttatggcatgaattatccaaaaaaatatcagaattacttattattctgtgatttcattagctcattaatgtttaactcacagattgggcatcaccatctagaatttcagtttaagggaggcctgcgcaaagctagttttatttcttaaaggataacagtcatacatagaatactaggaaagccaatattctatttaaaaataaacttctgatgcattttcattcttagcagaaaggtaaatgcttgagaaagcttgagtcaaatttgttaaaagaattttgagttctataaatccaaaaatctgaaacctgaatttatttaaatttataatcctttattttttaataccgtgccattttccacaaaggatttgtggttggtatataattctttaaagatacctggatcagtg

SEQ ID NO: 73 - DNA, 820 bp, Homo sapiens
  prostaglandin D2 synthase (1)..(820): LocusID: 5730; NM_000954
gctcctcctgcacacctccctcgctctcccacaccactggcaccaggccccggacacccgctctgctgcaggagaatggctactcatcacacgctgtggatgggactggccctgctgggggtgctgggcgacctgcaggcagcaccggaggcccaggtctccgtgcagcccaacttccagcaggacaagttcctggggcgctggttcagcgcgggcctcgcctccaactcgagctggctccgggagaagaaggcggcgttgtccatgtgcaagtctgtggtggcccctgccacggatggtggcctcaacctgacctccaccttcctcaggaaaaaccagtgtgagacccgaaccatgctgctgcagcccgcggggtccctcggctcctacagctaccggagtccccactggggcagcacctactccgtgtcagtggtggagaccgactacgaccagtacgcgctgctgtacagccagggcagcaagggccctggcgaggacttccgcatggccaccctctacagccgaacccagacccccagggctgagttaaaggagaaattcaccgccttctgcaaggcccagggcttcacagaggataccattgtcttcctgccccaaaccgataagtgcatgacggaacaataggactccccagggctgaagctgggatcccggccagccaggtgacccccacgctctggatgtctctgctctgttccttccccgagcccctgccccggctccccgccaaagcaaccctgcccactcaggcttcatcctgcacaataaactccggaagcaagtcagtaaaaaaaaa

SEQ ID NO: 74 - DNA, 1930 bp, Homo sapiens
  mitogen-activated protein kinase 9 transcript variant 1 (1)..(1930): LocusID: 5601; NM_002752
agggatctgaaacttgcccacccttcgggatattgcaggacgctgcatcatgagcgacagtaaatgtgacagtcagttttatagtgtgcaagtggcagactcaaccttcactgtcctaaaacgttaccagcagctgaaaccaattggctctggggcccaagggattgtttgtgctgcatttgatacagttcttgggataaatgttgcagtcaagaaactaagccgtccttttcagaaccaaactcatgcaaagagagcttatcgtgaacttgtcctcttaaaatgtgtcaatcataaaaatataattagtttgttaaatgtgtttacaccacaaaaaactctagaagaatttcaagatgtgtatttggttatggaattaatggatgctaacttatgtcaggttattcacatggagctggatcatgaaagaatgtcctaccttctttaccagatgctttgtggtattaaacatctgcattcagctggtataattcatagagatttgaagcctagcaacattgttgtgaaatcagactgcaccctgaagatccttgactttggcctggcccggacagcgtgcactaacttcatgatgaccccttacgtggtgacacggtactaccgggcgcccgaagtcatcctgggtatgggctacaaagagaacgttgatatctggtcagtgggttgcatcatgggagagctggtgaaaggttgtgtgatattccaaggcactgaccatattgatcagtggaataaagttattgagcagctgggaacaccatcagcagagttcatgaagaaacttcagccaactgtgaggaattatgtcgaaaacagaccaaagtatcctggaatcaaatttgaagaactctttccagattggatattcccatcagaatctgagcgagacaaaataaaaacaagtcaagccagagatctgttatcaaaaatgttagtgattgatcctgacaagcggatctctgtagacgaagctctgcgtcacccatacatcactgtttggtatgaccccgccgaagcagaagccccaccacctcaaatttatgatgcccagttggaagaaagagaacatgcaattgaagaatggaaagagctaatttacaaagaagtcatggattgggaagaaagaagcaagaatggtgttgtaaaagatcagccttcagatgcagcagtaagtagcaacgccactccttctcagtcttcatcgatcaatgacatttcatccatgtccactgagcagacgctggcctcagacacagacagcagtcttgatgcctcgacgggaccccttgaaggctgtcgatgataggttagaaatagcaaacctgtcagcattgaaggaactctcacctccgtgggcctgaaatgcttgggagttgatggaaccaaatagaaaaactccatgttctgcatgtaagaaacacaatgccttgccctattcagacctgataggattgcctgcttagatgataaaatgaggcagaatatgtctgaagaaaaaaattgcaagccacacttctagagattttgttcaagatcatttcaggtgagcagttagagtaggtgaatttgtttcaaattgtactagtgacagtttctcatcatctgtaactgttgagatgtatgtgcatgtgaccacaaatgcttgcttggacttgcccatctagcactttggaaatcagtatttaaatgccaaataatcttccaggtagtgctgcttctgaagttatctcttaatcctcttaagtaatttggtgtctgtccagaaaaagtcgatttatgtgtattaattggccatcatgatgttatcatatcttattcccttttatgctatgatttattctatcttttgtatttcagaagacatataattaaatctatttaataaataaaaatatatagctttaaaaaa

SEQ ID NO: 75 - DNA, 1940 bp, Homo sapiens
  mitogen-activated protein kinase 9 transcript variant 2 (1)..(1940): LocusID: 5601; NM_139068
agggatctgaaacttgcccacccttcgggatattgcaggacgctgcatcatgagcgacagtaaatgtgacagtcagttttatagtgtgcaagtggcagactcaaccttcactgtcctaaaacgttaccagcagctgaaaccaattggctctggggcccaagggattgtttgtgctgcatttgatacagttcttgggataaatgttgcagtcaagaaactaagccgtccttttcagaaccaaactcatgcaaagagagcttatcgtgaacttgtcctcttaaaatgtgtcaatcataaaaatataattagtttgttaaatgtgtttacaccacaaaaaactctagaagaatttcaagatgtgtatttggttatggaattaatggatgctaacttatgtcaggttattcacatggagctggatcatgaaagaatgtcctaccttctttaccagatgctttgtggtattaaacatctgcattcagctggtataattcatagagatttgaagcctagcaacattgttgtgaaatcagactgcaccctgaagatccttgactttggcctggcccggacagcgtgcactaacttcatgatgaccccttacgtggtgacacggtactaccgggcgcccgaagtcatcctgggtatgggctacaaagagaacgttgatatctggtcagtgggttgcatcatgggagagctggtgaaaggttgtgtgatattccaaggcactgaccatattgatcagtggaataaagttattgagcagctgggaacaccatcagcagagttcatgaagaaacttcagccaactgtgaggaattatgtcgaaaacagaccaaagtatcctggaatcaaatttgaagaactctttccagattggatattcccatcagaatctgagcgagacaaaataaaaacaagtcaagccagagatctgttatcaaaaatgttagtgattgatcctgacaagcggatctctgtagacgaagctctgcgtcacccatacatcactgtttggtatgaccccgccgaagcagaagccccaccacctcaaatttatgatgcccagttggaagaaagagaacatgcaattgaagaatggaaagagctaatttacaaagaagtcatggattgggaagaaagaagcaagaatggtgttgtaaaagatcagccttcagcacagatgcagcagtaagtagcaacgccactccttctcagtcttcatcgatcaatgacatttcatccatgtccactgagcagacgctggcctcagacacagacagcagtcttgatgcctcgacgggaccccttgaaggctgtcgatgataggttagaaatagcaaacctgtcagcattgaaggaactctcacctccgtgggcctgaaatgcttgggagttgatggaaccaaatagaaaaactccatgttctgcatgtaagaaacacaatgccttgccctattcagacctgataggattgcctgcttagatgataaaatgaggcagaatatgtctgaagaaaaaaattgcaagccacacttctagagattttgttcaagatcatttcaggtgagcagttagagtaggtgaatttgtttcaaattgtactagtgacagtttctcatcatctgtaactgttgagatgtatgtgcatgtgaccacaaatgcttgcttggacttgcccatctagcactttggaaatcagtatttaaatgccaaataatcttccaggtagtgctgcttctgaagttatctcttaatcctcttaagtaatttggtgtctgtccagaaaaagtcgatttatgtgtattaattggccatcatgatgttatcatatcttattcccttttatgctatgatttattctatcttttgtatttcagaagacatataattaaatctatttaataaataaaaatatatagctttaaaaaaaaaaa

SEQ ID NO: 76 - DNA, 1940 bp, Homo sapiens
  mitogen-activated protein kinase 9 transcript variant 3 (1)..(1940): LocusID: 5601; NM_139069
agggatctgaaacttgcccacccttcgggatattgcaggacgctgcatcatgagcgacagtaaatgtgacagtcagttttatagtgtgcaagtggcagactcaaccttcactgtcctaaaacgttaccagcagctgaaaccaattggctctggggcccaagggattgtttgtgctgcatttgatacagttcttgggataaatgttgcagtcaagaaactaagccgtccttttcagaaccaaactcatgcaaagagagcttatcgtgaacttgtcctcttaaaatgtgtcaatcataaaaatataattagtttgttaaatgtgtttacaccacaaaaaactctagaagaatttcaagatgtgtatttggttatggaattaatggatgctaacttatgtcaggttattcacatggagctggatcatgaaagaatgtcctaccttctttaccagatgctttgtggtattaaacatctgcattcagctggtataattcatagagatttgaagcctagcaacattgttgtgaaatcagactgcaccctgaagatccttgactttggcctggcccggacagcgtgcactaacttcatgatgaccccttacgtggtgacacggtactaccgggcgcccgaagtcatcctgggtatgggctacaaagagaacgttgatatctggtcagtcgggtgcatcatggcagaaatggtcctccataaagtcctgttcccgggaagagactatattgatcagtggaataaagttattgagcagctgggaacaccatcagcagagttcatgaagaaacttcagccaactgtgaggaattatgtcgaaaacagaccaaagtatcctggaatcaaatttgaagaactctttccagattggatattcccatcagaatctgagcgagacaaaataaaaacaagtcaagccagagatctgttatcaaaaatgttagtgattgatcctgacaagcggatctctgtagacgaagctctgcgtcacccatacatcactgtttggtatgaccccgccgaagcagaagccccaccacctcaaatttatgatgcccagttggaagaaagagaacatgcaattgaagaatggaaagagctaatttacaaagaagtcatggattgggaagaaagaagcaagaatggtgttgtaaaagatcagccttcagcacagatgcagcagtaagtagcaacgccactccttctcagtcttcatcgatcaatgacatttcatccatgtccactgagcagacgctggcctcagacacagacagcagtcttgatgcctcgacgggaccccttgaaggctgtcgatgataggttagaaatagcaaacctgtcagcattgaaggaactctcacctccgtgggcctgaaatgcttgggagttgatggaaccaaatagaaaaactccatgttctgcatgtaagaaacacaatgccttgccctattcagacctgataggattgcctgcttagatgataaaatgaggcagaatatgtctgaagaaaaaaattgcaagccacacttctagagattttgttcaagatcatttcaggtgagcagttagagtaggtgaatttgtttcaaattgtactagtgacagtttctcatcatctgtaactgttgagatgtatgtgcatgtgaccacaaatgcttgcttggacttgcccatctagcactttggaaatcagtatttaaatgccaaataatcttccaggtagtgctgcttctgaagttatctcttaatcctcttaagtaatttggtgtctgtccagaaaaagtcgatttatgtgtattaattggccatcatgatgttatcatatcttattcccttttatgctatgatttattctatcttttgtatttcagaagacatataattaaatctatttaataaataaaaatatatagctttaaaaaaaaaaa

SEQ ID NO: 77 - DNA, 1930 bp, Homo sapiens
  mitogen-activated protein kinase 9 transcript variant 4 (1)..(1930): LocusID: 5601; NM_139070
agggatctgaaacttgcccacccttcgggatattgcaggacgctgcatcatgagcgacagtaaatgtgacagtcagttttatagtgtgcaagtggcagactcaaccttcactgtcctaaaacgttaccagcagctgaaaccaattggctctggggcccaagggattgtttgtgctgcatttgatacagttcttgggataaatgttgcagtcaagaaactaagccgtccttttcagaaccaaactcatgcaaagagagcttatcgtgaacttgtcctcttaaaatgtgtcaatcataaaaatataattagtttgttaaatgtgtttacaccacaaaaaactctagaagaatttcaagatgtgtatttggttatggaattaatggatgctaacttatgtcaggttattcacatggagctggatcatgaaagaatgtcctaccttctttaccagatgctttgtggtattaaacatctgcattcagctggtataattcatagagatttgaagcctagcaacattgttgtgaaatcagactgcaccctgaagatccttgactttggcctggcccggacagcgtgcactaacttcatgatgaccccttacgtggtgacacggtactaccgggcgcccgaagtcatcctgggtatgggctacaaagagaacgttgatatctggtcagtcgggtgcatcatggcagaaatggtcctccataaagtcctgttcccgggaagagactatattgatcagtggaataaagttattgagcagctgggaacaccatcagcagagttcatgaagaaacttcagccaactgtgaggaattatgtcgaaaacagaccaaagtatcctggaatcaaatttgaagaactctttccagattggatattcccatcagaatctgagcgagacaaaataaaaacaagtcaagccagagatctgttatcaaaaatgttagtgattgatcctgacaagcggatctctgtagacgaagctctgcgtcacccatacatcactgtttggtatgaccccgccgaagcagaagccccaccacctcaaatttatgatgcccagttggaagaaagagaacatgcaattgaagaatggaaagagctaatttacaaagaagtcatggattgggaagaaagaagcaagaatggtgttgtaaaagatcagccttcagatgcagcagtaagtagcaacgccactccttctcagtcttcatcgatcaatgacatttcatccatgtccactgagcagacgctggcctcagacacagacagcagtcttgatgcctcgacgggaccccttgaaggctgtcgatgataggttagaaatagcaaacctgtcagcattgaaggaactctcacctccgtgggcctgaaatgcttgggagttgatggaaccaaatagaaaaactccatgttctgcatgtaagaaacacaatgccttgccctattcagacctgataggattgcctgcttagatgataaaatgaggcagaatatgtctgaagaaaaaaattgcaagccacacttctagagattttgttcaagatcatttcaggtgagcagttagagtaggtgaatttgtttcaaattgtactagtgacagtttctcatcatctgtaactgttgagatgtatgtgcatgtgaccacaaatgcttgcttggacttgcccatctagcactttggaaatcagtatttaaatgccaaataatcttccaggtagtgctgcttctgaagttatctcttaatcctcttaagtaatttggtgtctgtccagaaaaagtcgatttatgtgtattaattggccatcatgatgttatcatatcttattcccttttatgctatgatttattctatcttttgtatttcagaagacatataattaaatctatttaataaataaaaatatatagctttaaaaaa

SEQ ID NO: 78 - DNA, 1480 bp, Homo sapiens
  interleukin 15 transcript variant 3 (1)..(1480): LocusID: 3600; NM_000585
gactccgggtggcaggcgcccgggggaatcccagctgactcgctcactgccttcgaagtccggcgccccccgggagggaactgggtggccgcaccctcccggctgcggtggctgtcgccccccaccctgcagccaggactcgatggagaatccattccaatatatggccatgtggctctttggagcaatgttccatcatgttccatgctgctgctgacgtcacatggagcacagaaatcaatgttagcagatagccagcccatacaagatcgtattgtattgtaggaggcatcgtggatggatggctgctggaaaccccttgccatagccagctcttcttcaatacttaaggatttaccgtggctttgagtaatgagaatttcgaaaccacatttgagaagtatttccatccagtgctacttgtgtttacttctaaacagtcattttctaactgaagctggcattcatgtcttcattttgggctgtttcagtgcagggcttcctaaaacagaagccaactgggtgaatgtaataagtgatttgaaaaaaattgaagatcttattcaatctatgcatattgatgctactttatatacggaaagtgatgttcaccccagttgcaaagtaacagcaatgaagtgctttctcttggagttacaagttatttcacttgagtccggagatgcaagtattcatgatacagtagaaaatctgatcatcctagcaaacaacagtttgtcttctaatgggaatgtaacagaatctggatgcaaagaatgtgaggaactggaggaaaaaaatattaaagaatttttgcagagttttgtacatattgtccaaatgttcatcaacacttcttgattgcaattgattctttttaaagtgtttctgttattaacaaacatcactctgctgcttagacataacaaaacactcggcatttcaaatgtgctgtcaaaacaagtttttctgtcaagaagatgatcagaccttggatcagatgaactcttagaaatgaaggcagaaaaatgtcattgagtaatatagtgactatgaacttctctcagacttactttactcatttttttaatttattattgaaattgtacatatttgtggaataatgtaaaatgttgaataaaaatatgtacaagtgttgttttttaagttgcactgatattttacctcttattgcaaaatagcatttgtttaagggtgatagtcaaattatgtattggtggggctgggtaccaatgctgcaggtcaacagctatgctggtaggctcctgccagtgtggaaccactgactactggctctcattgacttccttactaagcatagcaaacagaggaagaatttgttatcagtaagaaaaagaagaactatatgtgaatcctcttctttatactgtaatttagttattgatgtataaagcaactgttatgaaataaagaaattgcaataactggcaaaaaaaaa

SEQ ID NO: 79 - DNA, 1960 bp, Homo sapiens
  interleukin 15 transcript variant 1 (1)..(1960): LocusID: 3600; NM_172174
gactccgggtggcaggcgcccgggggaatcccagctgactcgctcactgccttcgaagtccggcgccccccgggagggaactgggtggccgcaccctcccggctgcggtggctgtcgccccccaccctgcagccaggactcgatggaggtacagagctcggcttctttgccttgggaggggagtggtggtggttgaaagggcgatggaattttccccgaaagcctacgcccagggcccctcccagctccagcgttaccctccggtctatcctactggccgagctgccccgccttctcatggggaaaacttagccgcaacttcaatttttggtttttcctttaatgacacttctgaggctctcctagccatcctcccgcttccggaggagcgcagatcgcaggtccctttgcccctggcgtgcgactccctactgcgctgcgctcttacggcgttccaggctgctggctagcgcaaggcgggccgggcaccccgcgctccgctgggagggtgagggacgcgcgtctggcggccccagccaagctgcgggtttctgagaagacgctgtcccgcagccctgagggctgagttctgcacccagtcaagctcaggaaggccaagaaaagaatccattccaatatatggccatgtggctctttggagcaatgttccatcatgttccatgctgctgacgtcacatggagcacagaaatcaatgttagcagatagccagcccatacaagatcgtattgtattgtaggaggcatcgtggatggatggctgctggaaaccccttgccatagccagctcttcttcaatacttaaggatttaccgtggctttgagtaatgagaatttcgaaaccacatttgagaagtatttccatccagtgctacttgtgtttacttctaaacagtcattttctaactgaagctggcattcatgtcttcattttgggctgtttcagtgcagggcttcctaaaacagaagccaactgggtgaatgtaataagtgatttgaaaaaaattgaagatcttattcaatctatgcatattgatgctactttatatacggaaagtgatgttcaccccagttgcaaagtaacagcaatgaagtgctttctcttggagttacaagttatttcacttgagtccggagatgcaagtattcatgatacagtagaaaatctgatcatcctagcaaacaacagtttgtcttctaatgggaatgtaacagaatctggatgcaaagaatgtgaggaactggaggaaaaaaatattaaagaatttttgcagagttttgtacatattgtccaaatgttcatcaacacttcttgattgcaattgattctttttaaagtgtttctgttattaacaaacatcactctgctgcttagacataacaaaacactcggcatttcaaatgtgctgtcaaaacaagtttttctgtcaagaagatgatcagaccttggatcagatgaactcttagaaatgaaggcagaaaaatgtcattgagtaatatagtgactatgaacttctctcagacttactttactcatttttttaatttattattgaaattgtacatatttgtggaataatgtaaaatgttgaataaaaatatgtacaagtgttgttttttaagttgcactgatattttacctcttattgcaaaatagcatttgtttaagggtgatagtcaaattatgtattggtggggctgggtaccaatgctgcaggtcaacagctatgctggtaggctcctgccagtgtggaaccactgactactggctctcattgacttccttactaagcatagcaaacagaggaagaatttgttatcagtaagaaaaagaagaactatatgtgaatcctcttctttatactgtaatttagttattgatgtataaagcaactgttatgaaataaagaaattgcaataactggcaaaaaaaaaaaaaaaa

SEQ ID NO: 80 - DNA, 1550 bp, Homo sapiens
  interleukin 15  transcript variant 2 (1)..(1550): LocusID: 3600; NM_172175
aaatcctggctgtcatgtacttgctatgggcctagagtagcttacctaaatgctactaaccttcctccataccattattgtaaagattaaaggtgatgcatctgttaagtaactaatagagtgcttattaaaaggtaggtgttcaataagtattaattccctccctttctttttcttactagtgcacttgtgtttttaatggatcatactttaccctagattgtattgtaggaggcatcgtggatggatggctgctggaaaccccttgccatagccagctcttcttcaatacttaaggatttaccgtggctttgagtaatgagaatttcgaaaccacatttgagaagtatttccatccagtgctacttgtgtttacttctaaacagtcattttctaactgaagctggcattcatgtcttcattttgggatgcagctaatatacccagttggcccaaagcacctaacctatagttatataatctgactctcagttcagttttactctactaatgccttcatggtattgggaaccatagatttgtgcagctgtttcagtgcagggcttcctaaaacagaagccaactgggtgaatgtaataagtgatttgaaaaaaattgaagatcttattcaatctatgcatattgatgctactttatatacggaaagtgatgttcaccccagttgcaaagtaacagcaatgaagtgctttctcttggagttacaagttatttcacttgagtccggagatgcaagtattcatgatacagtagaaaatctgatcatcctagcaaacaacagtttgtcttctaatgggaatgtaacagaatctggatgcaaagaatgtgaggaactggaggaaaaaaatattaaagaatttttgcagagttttgtacatattgtccaaatgttcatcaacacttcttgattgcaattgattctttttaaagtgtttctgttattaacaaacatcactctgctgcttagacataacaaaacactcggcatttcaaatgtgctgtcaaaacaagtttttctgtcaagaagatgatcagaccttggatcagatgaactcttagaaatgaaggcagaaaaatgtcattgagtaatatagtgactatgaacttctctcagacttactttactcatttttttaatttattattgaaattgtacatatttgtggaataatgtaaaatgttgaataaaaatatgtacaagtgttgttttttaagttgcactgatattttacctcttattgcaaaatagcatttgtttaagggtgatagtcaaattatgtattggtggggctgggtaccaatgctgcaggtcaacagctatgctggtaggctcctgccagtgtggaaccactgactactggctctcattgacttccttactaagcatagcaaacagaggaagaatttgttatcagtaagaaaaagaagaactatatgtgaatcctcttctttatactgtaatttagttattgatgtataaagcaactgttatgaaataaagaaattgcaataactggcaaaaaaaaaaaaaa

SEQ ID NO: 81 - DNA, 5029 bp, Homo sapiens
  mucosa associated lymphoid tissue lymphoma translocation gene 1 transcript variant 1 (1)..(5029): Locus ID: 10892; NM_006785
cgaggctccgtgccccgccccccgggtgccccgcccctttgcgcggctggcgcggccagccggccaggctcccctcggcaaacctgtctaattggggcggggagcggagcttcctcctctgagggccgtgccgcgctgccagatttgttcttccgcccctgcctccgcggctcggaggcgagcggaaggtgccccggggccgaggcccgtgacggggcgggcgggagccccggcagtccggggtcgccggcgagggccatgtcgctgttgggggacccgctacaggccctgccgccctcggccgcccccacggggccgctgctcgcccctccggccggcgcgaccctcaaccgcctgcgggagccgctgctgcggaggctcagcgagctcctggatcaggcgcccgagggccggggctggaggagactggcggagctggcggggagtcgcgggcgcctccgcctcagttgcctagacctggagcagtgttctcttaaggtactggagcctgaaggaagccccagcctgtgtctgctgaagttaatgggtgaaaaaggttgcacagtcacagaattgagtgatttcctgcaggctatggaacacactgaagttcttcagcttctcagccccccaggaataaagattactgtaaacccagagtcaaaggcagtcttggctggacagtttgtgaaactgtgttgccgggcaactggacatccttttgttcaatatcagtggttcaaaatgaataaagagattccaaatggaaatacatcagagcttatttttaatgcagtgcatgtaaaagatgcaggcttttatgtctgtcgagttaataacaatttcacctttgaattcagccagtggtcacagctggatgtttgcgacatcccagagagcttccagagaagtgttgatggcgtctctgaatccaagttgcaaatctgtgttgaaccaacttcccaaaagctgatgccaggcagcacattggttttacagtgtgttgctgttggaagccctattcctcactaccagtggttcaaaaatgaattaccattaacacatgagaccaaaaagctatacatggtgccttatgtggatttggaacaccaaggaacctactggtgtcatgtatataatgatcgagacagtcaagatagcaagaaggtagaaatcatcataggaagaacagatgaggcagtggagtgcactgaagatgaattaaataatcttggtcatcctgataataaagagcaaacaactgaccagcctttggcgaaggacaaggttgcccttttgataggaaatatgaattaccgggagcaccccaagctcaaagctcctttggtggatgtgtacgaattgactaacttactgagacagctggacttcaaagtggtttcactgttggatcttactgaatatgagatgcgtaatgctgtggatgagtttttactccttttagacaagggagtatatgggttattatattatgcaggacatggttatgaaaattttgggaacagcttcatggtccccgttgatgctccaaatccatataggtctgaaaattgtctgtgtgtacaaaatatactgaaattgatgcaagaaaaagaaactggacttaatgtgttcttattggatatgtgtaggaaaagaaatgactacgatgataccattccaatcttggatgcactaaaagtcaccgccaatattgtgtttggatatgccacgtgtcaaggagcagaagcttttgaaatccagcattctggattggcaaatggaatctttatgaaatttttaaaagacagattattagaagataagaaaatcactgtgttactggatgaagttgcagaagatatgggtaagtgtcaccttaccaaaggcaaacaggctctagagattcgaagtagtttatctgagaagagagcacttactgatccaatacagggaacagaatattctgctgaatctcttgtgcggaatctacagtgggccaaggctcatgaacttccagaaagtatgtgtcttaagtttgactgtggtgttcagattcaattaggatttgcagctgagttttccaatgtcatgatcatctatacaagtatagtttacaaaccaccggagataataatgtgtgatgcctacgttactgattttccacttgatctagatattgatccaaaagatgcaaataaaggcacacctgaagaaactggcagctacttggtatcaaaggatcttcccaagcattgcctctataccagactcagttcactgcaaaaattaaaggaacatctagtcttcacagtatgtttatcatatcagtactcaggattggaagatactgtagaggacaagcaggaagtgaatgttgggaaacctctcattgctaaattagacatgcatcgaggtttgggaaggaagacttgctttcaaacttgtcttatgtctaatggtccttaccagagttctgcagccacctcaggaggagcagggcattatcactcattgcaagacccattccatggtgtttaccattcacatcctggtaatccaagtaatgttacaccagcagatagctgtcattgcagccggactccagatgcatttatttcaagtttcgctcaccatgcttcatgtcattttagtagaagtaatgtgccagtagagacaactgatgaaataccatttagtttctctgacaggctcagaatttctgaaaaatgacctccttgtttttgaaagttagcataattttagatgcctgtgaaatagtactgcacttacataaagtgagacattgtgaaaaggcaaatttgtatatgtagagaaagaatagtagtaactgtttcatagcaaacttcaggactttgagatgttgaaattacattatttaattacagacttcctctttctaagattttgtgaattggttgaatagttctatacaaatgaagtatggaggtgtgtatgtttatatgtatataacaaaatattttcattgtgaccactctgaagtaagagcaatgggaatggcattattgtagaataagtcattgtatttttaacaccagaaagaaccttgccgatcaccaggcataacctaattttatccatggaagaaacacagaaaggcatctaagttagagctggcaccagaactgagacctccagaaatctattccagtattttttccactacacaactgccttcctgacaggttctgagataagtgttatgtttgtagatagagtgaaatatatttatatatatataaatatatacagatacatatctgtgtattatctcaaggaatgtacaaactttagtttttgattataaggacttcactgcaagttttagttaagaggtttgtatataaatctgttatagaacaggctgaaatttcttgttcataagattatgaaaccacatgagaagtgataaaatgtttgttaaagctagatagaggttaagaatcaagatataatggataattttcatagctgcctatcagaatttcccaaatatttagcatcttccttgataatatgtattttcttcttgaatttcactggcctaatgagataatactcttatctttggctctacctaaaagttggttaaaaatgcaattggcattaacaaggaaaaatactgaattagtaattttaaaagtctcacaaagaaaatcccaggcctagatggctgcattgttgaattctgccaaacattaaaattagcactaattttttgcacactgtttctaaaagtaggagaggaaagaacacttcccaacttactctaggtcagtattaccctgatactagactagacatcacaagaaaactataagccaatattccttattaatacaaacacaaaaatcattaacaaaaatattagcaaactgaatccagcaacctataaaaaggattctatatcatgaccaagtggaatttatcccaggaattcaaggttggttcaacatctaaaaatcaaataagctaatatacagtcagttctcattattcacagtaattatgttctacagaatattctcccataaacactgaattaaatatggaacaactgcttttaggagaaagtgtatttgtgtatatgtgtgtatacatatgtttatctcacacacattatgagcttgaattcttaattcatcctagcaaattctaccttattttacagaagtgaaagtgaggtatcagaagtgttaagtgacatgcctgaggcacccccctaacaggtgtcagagctgaaattcaaaccccatccagctggccccggagccagagcttcttgtactacacagaattgcccctgccatttccaccctccagtcatttctctatgagactgaagcaggaaggcagagcatcatcttgttcagcctcagctgggaacatgtgtactgggtgactcaaatttttcacccatttacacatatccacaaatgactgcaaaagtgccacggatatcaatttgagggttataaattttagcaagttggtaaattcacaaatacataaccttgaataatgaggatcaactgtaccatatttaataaagcacaaaacccacacagattgtcttattacagcatttgataaaatccaaaactctttcataaaaacactcaacaaacttaggaataaaaggaatcttcctagatatgataaatataacatctatgaaaagcccacacctaacattatacttcatggtgatagactgaaggctgaatgttttccccttaagattgggaagaaggacaaggatgttcactcggcactacttctattcagcattgtacttgaagttctagccacagcagttaggttaggaattcaaggtttgttcaacatctaaaaatcaaataagctaataaagaaaagaggtttatactgcaaaagaagtgaaactatatgtattcacagttgatacatagttgtatatagaaaatgctaaagaatccataaaaagtaataaatgagttcaacaggt

SEQ ID NO: 82 - DNA, 4996 bp, Homo sapiens
  mucosa associated lymphoid tissue lymphoma translocation gene 1 transcript variant 2 (1)..(4996): LocusID: 10892; NM_173844
cgaggctccgtgccccgccccccgggtgccccgcccctttgcgcggctggcgcggccagccggccaggctcccctcggcaaacctgtctaattggggcggggagcggagcttcctcctctgagggccgtgccgcgctgccagatttgttcttccgcccctgcctccgcggctcggaggcgagcggaaggtgccccggggccgaggcccgtgacggggcgggcgggagccccggcagtccggggtcgccggcgagggccatgtcgctgttgggggacccgctacaggccctgccgccctcggccgcccccacggggccgctgctcgcccctccggccggcgcgaccctcaaccgcctgcgggagccgctgctgcggaggctcagcgagctcctggatcaggcgcccgagggccggggctggaggagactggcggagctggcggggagtcgcgggcgcctccgcctcagttgcctagacctggagcagtgttctcttaaggtactggagcctgaaggaagccccagcctgtgtctgctgaagttaatgggtgaaaaaggttgcacagtcacagaattgagtgatttcctgcaggctatggaacacactgaagttcttcagcttctcagccccccaggaataaagattactgtaaacccagagtcaaaggcagtcttggctggacagtttgtgaaactgtgttgccgggcaactggacatccttttgttcaatatcagtggttcaaaatgaataaagagattccaaatggaaatacatcagagcttatttttaatgcagtgcatgtaaaagatgcaggcttttatgtctgtcgagttaataacaatttcacctttgaattcagccagtggtcacagctggatgtttgcgacatcccagagagcttccagagaagtgttgatggcgtctctgaatccaagttgcaaatctgtgttgaaccaacttcccaaaagctgatgccaggcagcacattggttttacagtgtgttgctgttggaagccctattcctcactaccagtggttcaaaaatgaattaccattaacacatgagaccaaaaagctatacatggtgccttatgtggatttggaacaccaaggaacctactggtgtcatgtatataatgatcgagacagtcaagatagcaagaaggtagaaatcatcatagatgaattaaataatcttggtcatcctgataataaagagcaaacaactgaccagcctttggcgaaggacaaggttgcccttttgataggaaatatgaattaccgggagcaccccaagctcaaagctcctttggtggatgtgtacgaattgactaacttactgagacagctggacttcaaagtggtttcactgttggatcttactgaatatgagatgcgtaatgctgtggatgagtttttactccttttagacaagggagtatatgggttattatattatgcaggacatggttatgaaaattttgggaacagcttcatggtccccgttgatgctccaaatccatataggtctgaaaattgtctgtgtgtacaaaatatactgaaattgatgcaagaaaaagaaactggacttaatgtgttcttattggatatgtgtaggaaaagaaatgactacgatgataccattccaatcttggatgcactaaaagtcaccgccaatattgtgtttggatatgccacgtgtcaaggagcagaagcttttgaaatccagcattctggattggcaaatggaatctttatgaaatttttaaaagacagattattagaagataagaaaatcactgtgttactggatgaagttgcagaagatatgggtaagtgtcaccttaccaaaggcaaacaggctctagagattcgaagtagtttatctgagaagagagcacttactgatccaatacagggaacagaatattctgctgaatctcttgtgcggaatctacagtgggccaaggctcatgaacttccagaaagtatgtgtcttaagtttgactgtggtgttcagattcaattaggatttgcagctgagttttccaatgtcatgatcatctatacaagtatagtttacaaaccaccggagataataatgtgtgatgcctacgttactgattttccacttgatctagatattgatccaaaagatgcaaataaaggcacacctgaagaaactggcagctacttggtatcaaaggatcttcccaagcattgcctctataccagactcagttcactgcaaaaattaaaggaacatctagtcttcacagtatgtttatcatatcagtactcaggattggaagatactgtagaggacaagcaggaagtgaatgttgggaaacctctcattgctaaattagacatgcatcgaggtttgggaaggaagacttgctttcaaacttgtcttatgtctaatggtccttaccagagttctgcagccacctcaggaggagcagggcattatcactcattgcaagacccattccatggtgtttaccattcacatcctggtaatccaagtaatgttacaccagcagatagctgtcattgcagccggactccagatgcatttatttcaagtttcgctcaccatgcttcatgtcattttagtagaagtaatgtgccagtagagacaactgatgaaataccatttagtttctctgacaggctcagaatttctgaaaaatgacctccttgtttttgaaagttagcataattttagatgcctgtgaaatagtactgcacttacataaagtgagacattgtgaaaaggcaaatttgtatatgtagagaaagaatagtagtaactgtttcatagcaaacttcaggactttgagatgttgaaattacattatttaattacagacttcctctttctaagattttgtgaattggttgaatagttctatacaaatgaagtatggaggtgtgtatgtttatatgtatataacaaaatattttcattgtgaccactctgaagtaagagcaatgggaatggcattattgtagaataagtcattgtatttttaacaccagaaagaaccttgccgatcaccaggcataacctaattttatccatggaagaaacacagaaaggcatctaagttagagctggcaccagaactgagacctccagaaatctattccagtattttttccactacacaactgccttcctgacaggttctgagataagtgttatgtttgtagatagagtgaaatatatttatatatatataaatatatacagatacatatctgtgtattatctcaaggaatgtacaaactttagtttttgattataaggacttcactgcaagttttagttaagaggtttgtatataaatctgttatagaacaggctgaaatttcttgttcataagattatgaaaccacatgagaagtgataaaatgtttgttaaagctagatagaggttaagaatcaagatataatggataattttcatagctgcctatcagaatttcccaaatatttagcatcttccttgataatatgtattttcttcttgaatttcactggcctaatgagataatactcttatctttggctctacctaaaagttggttaaaaatgcaattggcattaacaaggaaaaatactgaattagtaattttaaaagtctcacaaagaaaatcccaggcctagatggctgcattgttgaattctgccaaacattaaaattagcactaattttttgcacactgtttctaaaagtaggagaggaaagaacacttcccaacttactctaggtcagtattaccctgatactagactagacatcacaagaaaactataagccaatattccttattaatacaaacacaaaaatcattaacaaaaatattagcaaactgaatccagcaacctataaaaaggattctatatcatgaccaagtggaatttatcccaggaattcaaggttggttcaacatctaaaaatcaaataagctaatatacagtcagttctcattattcacagtaattatgttctacagaatattctcccataaacactgaattaaatatggaacaactgcttttaggagaaagtgtatttgtgtatatgtgtgtatacatatgtttatctcacacacattatgagcttgaattcttaattcatcctagcaaattctaccttattttacagaagtgaaagtgaggtatcagaagtgttaagtgacatgcctgaggcacccccctaacaggtgtcagagctgaaattcaaaccccatccagctggccccggagccagagcttcttgtactacacagaattgcccctgccatttccaccctccagtcatttctctatgagactgaagcaggaaggcagagcatcatcttgttcagcctcagctgggaacatgtgtactgggtgactcaaatttttcacccatttacacatatccacaaatgactgcaaaagtgccacggatatcaatttgagggttataaattttagcaagttggtaaattcacaaatacataaccttgaataatgaggatcaactgtaccatatttaataaagcacaaaacccacacagattgtcttattacagcatttgataaaatccaaaactctttcataaaaacactcaacaaacttaggaataaaaggaatcttcctagatatgataaatataacatctatgaaaagcccacacctaacattatacttcatggtgatagactgaaggctgaatgttttccccttaagattgggaagaaggacaaggatgttcactcggcactacttctattcagcattgtacttgaagttctagccacagcagttaggttaggaattcaaggtttgttcaacatctaaaaatcaaataagctaataaagaaaagaggtttatactgcaaaagaagtgaaactatatgtattcacagttgatacatagttgtatatagaaaatgctaaagaatccataaaaagtaataaatgagttcaacaggt

SEQ ID NO: 83 - DNA, 1946 bp, Homo sapiens
  lysyl oxidase (1)..(1946): LocusID: 4015; NM_002317
agacactgcccgctctccgggactccgcgccgctccccgttgccttccaggactgagaaaggggaaagggaagggtgccacgtccgagcagccgccttgactggggaagggtctgaatcccacccttggcattgcttggtggagactgagatacccgtgctccgctcgcctccttggttgaagatttctccttccctcacgtgatttgagccccgtttttattttctgtgagccacgtcctcctcgagcggggtcaatctggcaaaaggagtgatgcgcttcgcctggaccgtgctcctgctcgggcctttgcagctctgcgcgctagtgcactgcgcccctcccgccgccggccaacagcagcccccgcgcgagccgccggcggctccgggcgcctggcgccagcagatccaatgggagaacaacgggcaggtgttcagcttgctgagcctgggctcacagtaccagcctcagcgccgccgggacccgggcgccgccgtccctggtgcagccaacgcctccgcccagcagccccgcactccgatcctgctgatccgcgacaaccgcaccgccgcggcgcgaacgcggacggccggctcatctggagtcaccgctggccgccccaggcccaccgcccgtcactggttccaagctggctactcgacatctagagcccgcgaagctggcgcctcgcgcgcggagaaccagacagcgccgggagaagttcctgcgctcagtaacctgcggccgcccagccgcgtggacggcatggtgggcgacgacccttacaacccctacaagtactctgacgacaacccttattacaactactacgatacttatgaaaggcccagacctgggggcaggtaccggcccggatacggcactggctacttccagtacggtctcccagacctggtggccgacccctactacatccaggcgtccacgtacgtgcagaagatgtccatgtacaacctgagatgcgcggcggaggaaaactgtctggccagtacagcatacagggcagatgtcagagattatgatcacagggtgctgctcagatttccccaaagagtgaaaaaccaagggacatcagatttcttacccagccgaccaagatattcctgggaatggcacagttgtcatcaacattaccacagtatggatgagtttagccactatgacctgcttgatgccaacacccagaggagagtggctgaaggccacaaagcaagtttctgtcttgaagacacatcctgtgactatggctaccacaggcgatttgcatgtactgcacacacacagggattgagtcctggctgttatgatacctatggtgcagacatagactgccagtggattgatattacagatgtaaaacctggaaactatatcctaaaggtcagtgtaaaccccagctacctggttcctgaatctgactataccaacaatgttgtgcgctgtgacattcgctacacaggacatcatgcgtatgcctcaggctgcacaatttcaccgtattagaaggcaaagcaaaactcccaatggataaatcagtgcctggtgttctgaagtgggaaaaaatagactaacttcagtaggatttatgtattttgaaaaagagaacagaaaacaacaaaagaatttttgtttggactgttttcaataacaaagcacataactggattttgaacgcttaagtcatcattacttgggaaatttttaatgtttattatttacatcactttgtgaattaacacagtgtttcaattctgtaattacatatttgactctttcaaagaaatccaaatttctcatgttccttttgaaattgtagtgcaaaatggtcagtattatctaaatgaatgagccaaaatgactttgaactgaaacttttctaaagtgctggaactttagtgaaacataataataatgggtttata

SEQ ID NO: 84 - DNA, 3380 bp, Homo sapiens
  integrin, beta 5 (1)..(3380): Locus ID: 3693; NM_002213
gcggagccagcccctcccctacccggagcagcccgctggggccgtcccgagcggcgacacactaggagtcccggccggccagccagggcagccgcggtcccgggactcggccgtgagtgctgcgggacggatggtggcggcggggcgcgggccagcgcgggcgccgtgagccggagctgcgcgcggggcatgcggctgcggcccccggccctcggcccccgcgctccggccccagccccggccgccggcccccgcggagtgcagcgaccgcgccgccgctgagggaggcgccccaccatgccgcgggccccggcgccgctgtacgcctgcctcctggggctctgcgcgctcctgccccggctcgcaggtctcaacatatgcactagtggaagtgccacctcatgtgaagaatgtctgctaatccacccaaaatgtgcctggtgctccaaagaggacttcggaagcccacggtccatcacctctcggtgtgatctgagggcaaaccttgtcaaaaatggctgtggaggtgagatagagagcccagccagcagcttccatgtcctgaggagcctgcccctcagcagcaagggttcgggctctgcaggctgggacgtcattcagatgacaccacaggagattgccgtgaacctccggcccggtgacaagaccaccttccagctacaggttcgccaggtggaggactatcctgtggacctgtactacctgatggacctctccctgtccatgaaggatgacttggacaatatccggagcctgggcaccaaactcgcggaggagatgaggaagctcaccagcaacttccggttgggatttgggtcttttgttgataaggacatctctcctttctcctacacggcaccgaggtaccagaccaatccgtgcattggttacaagttgtttccaaattgcgtcccctcctttgggttccgccatctgctgcctctcacagacagagtggacagcttcaatgaggaagttcggaaacagagggtgtcccggaaccgagatgcccctgaggggggctttgatgcagtactccaggcagccgtctgcaaggagaagattggctggcgaaaggatgcactgcatttgctggtgttcacaacagatgatgtgccccacatcgcattggatggaaaattgggaggcctggtgcagccacacgatggccagtgccacctgaacgaggccaacgagtacactgcatccaaccagatggactatccatcccttgccttgcttggagagaaattggcagagaacaacatcaacctcatctttgcagtgacaaaaaaccattatatgctgtacaagaattttacagccctgatacctggaacaacggtggagattttagatggagactccaaaaatattattcaactgattattaatgcatacaatagtatccggtctaaagtggagttgtcagtctgggatcagcctgaggatcttaatctcttctttactgctacctgccaagatggggtatcctatcctggtcagaggaagtgtgagggtctgaagattggggacacggcatcttttgaagtatcattggaggcccgaagctgtcccagcagacacacggagcatgtgtttgccctgcggccggtgggattccgggacagcctggaggtgggggtcacctacaactgcacgtgcggctgcagcgtggggctggaacccaacagtgccaggtgcaacgggagcgggacctatgtctgcggcctgtgtgagtgcagccccggctacctgggcaccaggtgcgagtgccaggatggggagaaccagagcgtgtaccagaacctgtgccgggaggcagagggcaagccactgtgcagcgggcgtggggactgcagctgcaaccagtgctcctgcttcgagagcgagttcggcaagatctatgggcctttctgtgagtgcgacaacttctcctgtgccaggaacaagggagtcctctgctcaggccatggcgagtgtcactgcggggaatgcaagtgccatgcaggttacatcggggacaactgtaactgctcgacagacatcagcacatgccggggcagagatggccagatctgcagcgagcgtgggcactgtctctgtgggcagtgccaatgcacggagccgggggcctttggggagatgtgtgagaagtgccccacctgcccggatgcatgcagcaccaagagagattgcgtcgagtgcctgctgctccactctgggaaacctgacaaccagacctgccacagcctatgcagggatgaggtgatcacatgggtggacaccatcgtgaaagatgaccaggaggctgtgctatgtttctacaaaaccgccaaggactgcgtcatgatgttcacctatgtggagctccccagtgggaagtccaacctgaccgtcctcagggagccagagtgtggaaacacccccaacgccatgaccatcctcctggctgtggtcggtagcatcctccttgttgggcttgcactcctggctatctggaagctgcttgtcaccatccacgaccggagggagtttgcaaagtttcagagcgagcgatccagggcccgctatgaaatggcttcaaatccattatacagaaagcctatctccacgcacactgtggacttcaccttcaacaagttcaacaaatcctacaatggcactgtggactgatgtttccttctccgaggggctggagcggggatctgatgaaaaggtcagactgaaacgccttgcacggctgctcggcttgatcacagctccctaggtaggcaccacagagaagaccttctagtgagcctgggccaggagcccacagtgcctgtacaggaaggtgcctggccatgtcacctggctgctaggccagagccatgccaggctgcgtccctccgagcttgggataaagcaaggggaccttggcactctcagctttccctgccacatccagcttgttgtcccaatgaaatactgagatgctgggctgtctctcccttccaggaatgctgggcccccagcctggccagacaagacgactgtcaggaagggtcggagtctgtaaaaccagcatacagtttggcttttttcacattgatcatttttatatgaaataaaaagatcctgcatttatggtgtagttctgagtcctgagacttttccgcgtgatggctatgccttgcacacaggtgttggtgatggggctgttgagatgcctgttgaaggtacatcgtttgcaaatgtcagtttcctctcctgtccgtgtttgtttagtacttttataatgaaaagaaacaagattgtttgggattggaagtaaagattaaaaccaaaagaatttgtgtttgtctgataaaaaaaaa

SEQ ID NO: 85 - DNA, 3670 bp, Homo sapiens
  aldehyde dehydrogenase 3 family, member A2 (1)..(3670): LocusID: 224; NM_000382
agtgggactcagcgggcgtggaggtcgcggcggacggagcgagccctgggcgagtgaattgtggctgtgggttgacggtggagacaccccccggagaggcggagggaagggaggcgaggctgcacctgcatgcttcccgcctcccactccccagcgcccccggaccgtgcagttctctgcaggaccaggccatggagctcgaagtccggcgggtccgacaggcgttcctgtccggccggtcgcgacctctgcggtttcggctgcagcagctggaggccctgcggaggatggtgcaggagcgcgagaaggatatcctgacggccatcgccgccgacctgtgcaagagtgaattcaatgtgtacagtcaggaagtcattactgtccttggggaaattgattttatgcttgagaatcttcctgaatgggttactgctaaaccagttaagaagaacgtgctcaccatgctggatgaggcctatattcagccacagcctctgggagtggtgctgataatcggagcttggaattaccccttcgttctcaccattcagccactgataggagccatcgctgcaggaaatgctgtgattataaagccttctgaactgagtgaaaatacagccaagatcttggcaaagcttctccctcagtatttagaccaggatctctatattgttattaatggtggtgttgaggaaaccacggagctcctgaagcagcgatttgaccacattttctatacgggaaacactgcggttggcaaaattgtcatggaagctgctgccaagcatctgacccctgtgactcttgaactgggagggaaaagtccatgttatattgataaagattgtgacctggacattgtttgcagacgcataacctggggaaaatacatgaattgtggccaaacctgcattgcacccgactatattctctgtgaagcatccctccaaaatcaaattgtatggaagattaaggaaacagtgaaggaattttatggagaaaatataaaagagtctcctgattatgaaaggatcatcaatcttcgtcattttaagaggatactaagtttgcttgaaggacaaaagatagcttttggtggggagactgatgaggccacacgctacatagccccaacagtacttaccgatgttgatcctaaaaccaaggtgatgcaagaagaaatttttggaccaattcttccaatagtgcctgtgaaaaatgtagatgaggccataaatttcataaatgaacgtgaaaagcctctggctctttatgtattttcgcataaccataagctcatcaaacggatgattgatgagacatccagtggaggtgtcacaggcaatgacgtcattatgcacttcacgctcaactctttcccatttggaggagtgggttccagtgggatgggagcttatcacggaaaacatagttttgatactttttctcatcagcgtccctgtttattaaaaagtttaaagagagaaggtgctaacaaactcagatatcctcccaacagccagtcaaaggtggattgggggaaattttttctcttgaaacggttcaacaaagaaaaactcggtctcctgttgctcactttcctgggtattgtagccgctgtgcttgtcaaggcagaatattactgaagaatgatcctgttcaacctcctagtgcctctactgaattattcctcttttaaatggttaatgaaccaataatttttaaatcataccaaaaatagtaagaaaatatgcaaacactctgtgatcaaacttaaaagtcattgccattcatcattaataaaagttgccatttcaactacgtcccaacattccctaatagggtattcagggaacctgtcttaaattgtgcttatctaaatcttggaactttgagctaggggaggagaatgtattagactaaatacaaactgcggggttgtaagggagtctcagaacctcactgaatccttcactccagttaatggcactgctcacttcctgcctctgctgccaccatcactgtgtgaagctttcaagagcttggtacttcccagggctaccggcagtcctctgtagtccagagaggtgagattagatcttcttggttccctgtgaggtttcaggcactaaaactctatgtggggaagggaggggttactcctcctccaatgggactcaaggacttgacctccaggagtaggcccctggtcagaagtgccatctcaccagtggtcttcattcttcctcattcattctttatcatcctgtgttctgtttagttgcaacaatctcttgtgactaatgtcactcaaagcatcttgtaacctagggcttcctggaagttagttgccaaagtcatgcaagcatcacctgtcattcttgtgttggagttatagaattctacatcttataaaacctaactggcatttaaaaaatactgtggccgggcgtggtggctcatgcctgtaatcccagcactttgggaggccgaggtgggaggattgcttgagtccaggaatttgagaccagcctggacaacacagtgagacctcatctctatcaaaaaataaaaattagctagatgtggtggcatgagcctgtgttcccagctgcttaggaggctgaagcaggaggattgattgagcctgcgaggccaaggctgcagcaggctgtgattgcaccactgcacttcagcttgggcaacagagcaagaccctgtctccgaaacaaataaaaaatactgtaataaaagtacttataaacatactaatcctctttcaggaccctaaagttgcaggttagtaggtcttcaaggacaaatctgtaagtttcttttctgtagtgcaagtaaaatttcactttttgaaactatagagagatccctttctgattagcctacagaacttaaagtgagggaaccatttcctctcacagacaaagaggcctgggatattaggactttggggtttgagagcatcatggggcagacagatggtggatggtctggacaagaagcgagtaagccactgcggttggtcatactgaagggaattgatggcaagaggatcccctgagcaagtcagaagttactctcatcagtcgttcatggtcacaacctgaggtactctgctgagtgggcaaggctgaagtaagaggcctgtggaatgcagcattacctgctggacagagcagggcaggcagttctatgccttggagctcctgactgcagggactctgtccccacactcagaaagactcagctcactcaatgagagaatgtgatttactttatagaacgtataatcaactttgttgaataatttgttctattaaggctgtctaaaatgtgatgtcttcatcatagtatgaagtgttgaaaattaataacgagcctagtttaggaaaaagctgcttaaaactgtggctctaagagagtaatcataaaataccttagataaaattgcactatggaattttcattgagtatgtttaaattattggcttgtctactaatacatctgcttcaaaatgaacatatttcataaaattggcatcaattttaatgacgctcctggtatggaacctcagatataccctattggagacaatcctttgatcataaattctccccaactataaatcattttatgtctttaaaaaaaaaa

SEQ ID NO: 86 - protein, 463 aa, Homo sapiens
  retinoid X receptor, gamma (1)..(463): LocusID: 6258; NM_006917
MYGNYSHFMKFPAGYGGSPGHTGSTSMSPSAALSTGKPMDSHPSYTDTPVSAPRTLSAVGTPLNALGSPYRVITSAMGPPSGALAAPPGINLVAPPSSQLNVVNSVSSSEDIKPLPGLPGIGNMNYPSTSPGSLVKHICAICGDRSSGKHYGVYSCEGCKGFFKRTIRKDLIYTCRDNKDCLIDKRQRNRCQYCRYQKCLVMGMKREAVQEERQRSRERAESEAECATSGHEDMPVERILEAELAVEPKTESYGDMNMENSTNDPVTNICHAADKQLFTLVEWAKRIPHFSDLTLEDQVILLRAGWNELLIASFSHRSVSVQDGILLATGLHVHRSSAHSAGVGSIFDRVLTELVSKMKDMQMDKSELGCLRAIVLFNPDAKGLSNPSEVETLREKVYATLEAYTKQKYPEQPGRFAKLLLRLPALRSIGLKCLEHLFFFKLIGDTPIDTFLMEMLETPLQIT

SEQ ID NO: 87 - protein, 215 aa, Homo sapiens
  vascular endothelial growth factor (1)..(215): LocusID; 7422; NM_003376
MNFLLSWVHWSLALLLYLHHAKWSQAAPMAEGGGQNHHEVVKFMDVYQRSYCHPIETLVDIFQEYPDEIEYIFKPSCVPLMRCGGCCNDEGLECVPTEESNITMQIMRIKPHQGQHIGEMSFLQHNKCECRPKKDRARQEKKSVRGKGKGQKRKRKKSRYKSWSVPCGPCSERRKHLFVQDPQTCKCSCKNTDSRCKARQLELNERTCRCDKPRR

SEQ ID NO: 88 - protein, 472 aa, Homo sapiens
  cannabinoid receptor 1 (brain) variant 1 (1)..(472): LocusID: 1268; NM_016083
MKSILDGLADTTFRTITTDLLYVGSNDIQYEDIKGDMASKLGYFPQKFPLTSFRGSPFQEKMTAGDNPQLVPADQVNITEFYNKSLSSFKENEENIQCGENFMDIECFMVLNPSQQLAIAVLSLTLGTFTVLENLLVLCVILHSRSLRCRPSYHFIGSLAVADLLGSVIFVYSFIDFHVFHRKDSRNVFLFKLGGVTASFTASVGSLFLTAIDRYISIHRPLAYKRIVTRPKAVVAFCLMWTIAIVIAVLPLLGWNCEKLQSVCSDIFPHIDETYLMFWIGVTSVLLLFIVYAYMYILWKAHSHAVRMIQRGTQKSIIIHTSEDGKVQVTRPDQARMDIRLAKTLVLILVVLIICWGPLLAIMVYDVFGKMNKLIKTVFAFCSMLCLLNSTVNPIIYALRSKDLRHAFRSMFPSCEGTAQPLDNSMGDSDCLHKHANNAASVHRAAESCIKSTVKIAKVTMSVSTDTSAEAL

SEQ ID NO: 89 - protein, 411 aa, Homo sapiens
  cannabinoid receptor 1 (brain) variant 2 (1)..(411): LocusID: 1268; NM_033181
MALQIPPSAPSPLTSCTWAQMTFSTKTSKENEENIQCGENFMDIECFMVLNPSQQLAIAVLSLTLGTFTVLENLLVLCVILHSRSLRCRPSYHFIGSLAVADLLGSVIFVYSFIDFHVFHRKDSRNVFLFKLGGVTASFTASVGSLFLTAIDRYISIHRPLAYKRIVTRPKAVVAFCLMWTIAIVIAVLPLLGWNCEKLQSVCSDIFPHIDETYLMFWIGVTSVLLLFIVYAYMYILWKAHSHAVRMIQRGTQKSIIIHTSEDGKVQVTRPDQARMDIRLAKTLVLILVVLIICWGPLLAIMVYDVFGKMNKLIKTVFAFCSMLCLLNSTVNPIIYALRSKDLRHAFRSMFPSCEGTAQPLDNSMGDSDCLHKHANNAASVHRAAESCIKSTVKIAKVTMSVSTDTSAEAL

SEQ ID NO: 90 - protein, 321 aa, Homo sapiens
  cathepsin O (1)..(321): LocusID: 1519; NM_001334
MDVRALPWLPWLLWLLCRGGGDADSRAPFTPTWPRSREREAAAFRESLNRHRYLNSLFPSENSTAFYGINQFSYLFPEEFKAIYLRSKPSKFPRYSAEVHMSIPNVSLPLRFDWRDKQVVTQVRNQQMCGGCWAFSVVGAVESAYAIKGKPLEDLSVQQVIDCSYNNYGCNGGSTLNALNWLNKMQVKLVKDSEYPFKAQNGLCHYFSGSHSGFSIKGYSAYDFSDQEDEMAKALLTFGPLVVIVDAVSWQDYLGGIIQHHCSSGEANHAVLITGFDKTGSTPYWIVRNSWGSSWGVDGYAHVKMGSNVCGIADSVSSIFV

SEQ ID NO: 91 - protein, 290 aa, Homo sapiens
  enoyl Coenzyme A hydratase, short chain, 1 (1)..(290): LocusID: 1892; NM_004092
MAALRVLLSCARGPLRPPVRCPAWRPFASGANFEYIIAEKRGKNNTVGLIQLNRPKALNALCDGLIDELNQALKIFEEDPAVGAIVLTGGDKAFAAGADIKEMQNLSFQDCYSSKFLKHWDHLTQVKKPVIAAVNGYAFGGGCELAMMCDIIYAGEKAQFAQPEILIGTIPGAGGTQRLTRAVGKSLAMEMVLTGDRISAQDAKQAGLVSKICPVETLVEEAIQCAEKIASNSKIVVAMAKESVNAAFEMTLTEGSKLEKKLFYSTFATDDRKEGMTAFVEKRKANFKDQ

SEQ ID NO: 92 - protein, 207 aa, Homo sapiens
  vascular endothelial growth factor B (1)..(207): LocusID: 7423; NM_003377
MSPLLRRLLLAALLQLAPAQAPVSQPDAPGHQRKVVSWIDVYTRATCQPREVVVPLTVELMGTVAKQLVPSCVTVQRCGGCCPDDGLECVPTGQHQVRMQILMIRYPSSQLGEMSLEEHSQCECRPKKKDSAVKPDRAATPHHRPQPRSVPGWDSAPGAPSPADITHPTPAPGPSAHAAPSTTSALTPGPAAAAADAAASSVAKGGA

SEQ ID NO: 93 - protein, 1178 aa, Homo sapiens
  pyruvate carboxylase variant A (1)..(1178): LocusID: 5091; NM_000920
MLKFRTVHGGLRLLGIRRTSTAPAASPNVRRLEYKPIKKVMVANRGEIAIRVFRACTELGIRTVAIYSEQDTGQMHRQKADEAYLIGRGLAPVQAYLHIPDIIKVAKENNVDAVHPGYGFLSERADFAQACQDAGVRFIGPSPEVVRKMGDKVEARAIAIAAGVPVVPGTDAPITSLHEAHEFSNTYGFPIIFKAAYGGGGRGMRVVHSYEELEENYTRAYSEALAAFGNGALFVEKFIEKPRHIEVQILGDQYGNILHLYERDCSIQRRHQKVVEIAPAAHLDPQLRTRLTSDSVKLAKQVGYENAGTVEFLVDRHGKHYFIEVNSRLQVEHTVTEEITDVDLVHAQIHVSEGRSLPDLGLRQENIRINGCAIQCRVTTEDPARSFQPDTGRIEVFRSGEGMGIRLDNASAFQGAVISPHYDSLLVKVIAHGKDHPTAATKMSRALAEFRVRGVKTNIAFLQNVLNNQQFLAGTVDTQFIDENPELFQLRPAQNRAQKLLHYLGHVMVNGPTTPIPVKASPSPTDPVVPAVPIGPPPAGFRDILLREGPEGFARAVRNHPGLLLMDTTFRDAHQSLLATRVRTHDLKKIAPYVAHNFSKLFSMENWGGATFDVAMRFLYECPWRRLQELRELIPNIPFQMLLRGANAVGYTNYPDNVVFKFCEVAKENGMDVFRVFDSLNYLPNMLLGMEAAGSAGGVVEAAISYTGDVADPSRTKYSLQYYMGLAEELVRAGTHILCIKDMAGLLKPTACTMLVSSLRDRFPDLPLHIHTHDTSGAGVAAMLACAQAGADVVDVAADSMSGMTSQPSMGALVACTRGTPLDTEVPMERVFDYSEYWEGARGLYAAFDCTATMKSGNSDVYENEIPGGQYTNLHFQAHSMGLGSKFKEVKKAYVEANQMLGDLIKVTPSSKIVGDLAQFMVQNGLSRAEAEAQAEELSFPRSVVEFLQGYIGVPHGGFPEPFRSKVLKDLPRVEGRPGASLPPLDLQALEKELVDRHGEEVTPEDVLSAAMYPDVFAHFKDFTATFGPLDSLNTRLFLQGPKIAEEFEVELERGKTLHIKALAVSDLNRAGQRQVFFELNGQLRSILVKDTQAMKEMHFHPKALKDVKGQIGAPMPGKVIDIKVVAGAKVAKGQPLCVLSAMKMETVVTSPMEGTVRKVHVTKDMTLEGDDLILEIE

SEQ ID NO: 94 - protein, 1178 aa, Homo sapiens; identical to SEQ ID NO: 93
  pyruvate carboxylase variant 2 (1)..(1178): LocusID: 5091; NM_022172

SEQ ID NO: 95 - protein, 314 aa, Homo sapiens
  L-3-hydroxyacyl-Coenzyme A dehydrogenase, short chain (1)..(314): LocusID: 3033; NM_005327
MAFVTRQFMRSVSSSSTASASAKKIIVKHVTVIGGGLMGAGIAQVAAATGHTVVLVDQTEDILAKSKKGIEESLRKVAKKKFAENPKAGDEFVEKTLSTIATSTDAASVVHSTDLVVEAIVENLKVKNELFKRLDKFAAEHTIFASNTSSLHITSIANATTRQDRFAGLHFFNPVPVMKLVEVIKTPMTSQKTFESLVDFSKALGKHPVSCKDTPGFIVNRLLVPYLMEAIRLYERGDASKEDIDTAMKLGAGYPMGPFELLDYVGLDTTKFIVDGWHEMDAENPLHQPSPSLNKLVAENKFGKKTGEGFYKYK

SEQ ID NO: 96 - protein, 407 aa, Homo sapiens
  pyruvate dehydrogenase kinase, isoenzyme 2 (1)..(407): LocusID: 5164; NM_002611
MRWVWALLKNASLAGAPKYIEHFSKFSPSPLSMKQFLDFGSSNACEKTSFTFLRQELPVRLANIMKEINLLPDRVLSTPSVQLVQSWYVQSLLDIMEFLDKDPEDHRTLSQFTDALVTIRNRHNDVVPTMAQGVLEYKDTYGDDPVSNQNIQYFLDRFYLSRISIRMLINQHTLIFDGSTNPAHPKHIGSIDPNCNVSEVVKDAYDMAKLLCDKYYMASPDLEIQEINAANSKQPIHMVYVPSHLYHMLFELFKNAMRATVESHESSLILPPIKVMVALGEEDLSIKMSDRGGGVPLRKIERLFSYMYSTAPTPQPGTGGTPLAGFGYGLPISRLYAKYFQGDLQLFSMEGFGTDAVIYLKALSTDSVERLPVYNKSAWRHYQTIQEAGDWCVPSTEPKNTSTYRVS

SEQ ID NO: 97 - protein, 466 aa, Homo sapiens [sequence omitted]

SEQ ID NO: 98 - protein, 400 aa, Homo sapiens
  citrate synthase variant 2 (1)..(400): LocusID: 1431; NM_198324
MMYGGMRGMKGLVYETSVLDPDEGIRFRGFSIPECQKLLPKAKGGEEPLPEGLFWLLVTGHIPTEEQVSWLSKEWAKRAALPSHVVTMLDNFPTNLHPMSQLSAAVTALNSESNFARAYAQGISRTKYWELIYEDSMDLIAKLPCVAAKIYRNLYREGSGIGAIDSNLDWSHNFTNMLGYTDHQFTELTRLYLTIHSDHEGGNVSAHTSHLVGSALSDPYLSFAAAMNGLAGPLHGLANQEVLVWLTQLQKEVGKDVSDEKLRDYIWNTLNSGRVVPGYGHAVLRKTDPRYTCQREFALKHLPNDPMFKLVAQLYKIVPNVLLEQGKAKNPWPNVDAHSGVLLQYYGMTEMNYYTVLFGVSRALGVLAQLIWSRALGFPLERPKSMSTEGLMKFVDSKSG

SEQ ID NO: 99 - protein, 821 aa, Homo sapiens
  fibroblast growth factor receptor 2 variant 1 (1)..(821): LocusID: 2263; NM_000141
MVSWGRFICLVVVTMATLSLARPSFSLVEDTTLEPEEPPTKYQISQPEVYVAAPGESLEVRCLLKDAAVISWTKDGVHLGPNNRTVLIGEYLQIKGATPRDSGLYACTASRTVDSETWYFMVNVTDAISSGDDEDDTDGAEDFVSENSNNKRAPYWTNTEKMEKRLHAVPAANTVKFRCPAGGNPMPTMRWLKNGKEFKQEHRIGGYKVRNQHWSLIMESVVPSDKGNYTCVVENEYGSINHTYHLDVVERSPHRPILQAGLPANASTVVGGDVEFVCKVYSDAQPHIQWIKHVEKNGSKYGPDGLPYLKVLKAAGVNTTDKEIEVLYIRNVTFEDAGEYTCLAGNSIGISFHSAWLTVLPAPGREKEITASPDYLEIAIYCIGVFLIACMVVTVILCRMKNTTKKPDFSSQPAVHKLTKRIPLRRQVTVSAESSSSMNSNTPLVRITTRLSSTADTPMLAGVSEYELPEDPKWEFPRDKLTLGKPLGEGCFGQVVMAEAVGIDKDKPKEAVTVAVKMLKDDATEKDLSDLVSEMEMMKMIGKHKNIINLLGACTQDGPLYVIVEYASKGNLREYLRARRPPGMEYSYDINRVPEEQMTFKDLVSCTYQLARGMEYLASQKCIHRDLAARNVLVTENNVMKIADFGLARDINNIDYYKKTTNGRLPVKWMAPEALFDRVYTHQSDVWSFGVLMWEIFTLGGSPYPGIPVEELFKLLKEGHRMDKPANCTNELYMMMRDCWHAVPSQRPTFKQLVEDLDRILTLTTNEEYLDLSQPLEQYSPSYPDTRSSCSSGDDSVFSPDPMPYEPCLPQYPHINGSVKT

SEQ ID NO: 100 - protein, 822 aa, Homo sapiens
  fibroblast growth factor receptor 2 variant 2 (1)..(822): LocusID: 2263; NM_022969
MVSWGRFICLVVVTMATLSLARPSFSLVEDTTLEPEEPPTKYQISQPEVYVAAPGESLEVRCLLKDAAVISWTKDGVHLGPNNRTVLIGEYLQIKGATPRDSGLYACTASRTVDSETWYFMVNVTDAISSGDDEDDTDGAEDFVSENSNNKRAPYWTNTEKMEKRLHAVPAANTVKFRCPAGGNPMPTMRWLKNGKEFKQEHRIGGYKVRNQHWSLIMESVVPSDKGNYTCVVENEYGSINHTYHLDVVERSPHRPILQAGLPANASTVVGGDVEFVCKVYSDAQPHIQWIKHVEKNGSKYGPDGLPYLKVLKHSGINSSNAEVLALFNVTEADAGEYICKVSNYIGQANQSAWLTVLPKQQAPGREKEITASPDYLEIAIYCIGVFLIACMVVTVILCRMKNTTKKPDFSSQPAVHKLTKRIPLRRQVTVSAESSSSMNSNTPLVRITTRLSSTADTPMLAGVSEYELPEDPKWEFPRDKLTLGKPLGEGCFGQVVMAEAVGIDKDKPKEAVTVAVKMLKDDATEKDLSDLVSEMEMMKMIGKHKNIINLLGACTQDGPLYVIVEYASKGNLREYLRARRPPGMEYSYDINRVPEEQMTFKDLVSCTYQLARGMEYLASQKCIHRDLAARNVLVTENNVMKIADFGLARDINNIDYYKKTTNGRLPVKWMAPEALFDRVYTHQSDVWSFGVLMWEIFTLGGSPYPGIPVEELFKLLKEGHRMDKPANCTNELYMMMRDCWHAVPSQRPTFKQLVEDLDRILTLTTNEEYLDLSQPLEQYSPSYPDTRSSCSSGDDSVFSPDPMPYEPCLPQYPHINGSVKT

SEQ ID NO: 101 - protein, 705 aa, Homo sapiens
  fibroblast growth factor receptor 2 variant 3 (1)..(705): LocusID: 2263; NM_022970
MVSWGRFICLVVVTMATLSLARPSFSLVEDTTLEPEEPPTKYQISQPEVYVAAPGESLEVRCLLKDAAVISWTKDGVHLGPNNRTVLIGEYLQIKGATPRDSGLYACTASRTVDSETWYFMVNVTDAISSGDDEDDTDGAEDFVSENSNNKRAPYWTNTEKMEKRLHAVPAANTVKFRCPAGGNPMPTMRWLKNGKEFKQEHRIGGYKVRNQHWSLIMESVVPSDKGNYTCVVENEYGSINHTYHLDVVERSPHRPILQAGLPANASTVVGGDVEFVCKVYSDAQPHIQWIKHVEKNGSKYGPDGLPYLKVLKVSAESSSSMNSNTPLVRITTRLSSTADTPMLAGVSEYELPEDPKWEFPRDKLTLGKPLGEGCFGQVVMAEAVGIDKDKPKEAVTVAVKMLKDDATEKDLSDLVSEMEMMKMIGKHKNIINLLGACTQDGPLYVIVEYASKGNLREYLRARRPPGMEYSYDINRVPEEQMTFKDLVSCTYQLARGMEYLASQKCIHRDLAARNVLVTENNVMKIADFGLARDINNIDYYKKTTNGRLPVKWMAPEALFDRVYTHQSDVWSFGVLMWEIFTLGGSPYPGIPVEELFKLLKEGHRMDKPANCTNELYMMMRDCWHAVPSQRPTFKQLVEDLDRILTLTTNEEYLDLSQPLEQYSPSYPDTRSSCSSGDDSVFSPDPMPYEPCLPQYPHINGSVKT

SEQ ID NO: 102 - protein, 254 aa, Homo sapiens
  fibroblast growth factor receptor 2 variant 4 (1)..(254): LocusID; 2263; NM_022971
MVSWGRFICLVVVTMATLSLARPSFSLVEDTTLEPEEPPTKYQISQPEVYVAAPGESLEVRCLLKDAAVISWTKDGVHLGPNNRTVLIGEYLQIKGATPRDSGLYACTASRTVDSETWYFMVNVTDAISSGDDEDDTDGAEDFVSENSNNKRAPYWTNTEKMEKRLHAVPAANTVKFRCPAGGNPMPTMRWLKNGKEFKQEHRIGGYKVRNQHWSLIMESVVPSDKGNYTCVVENEYGSINHTYHLDVVGSQGL

SEQ ID NO: 103 - protein, 822 aa, Homo sapiens
  fibroblast growth factor receptor 2 variant 5 (1)..(822): LocusID: 2263; NM_022972
MVSWGRFICLVVVTMATLSLARPSFSLVEDTTLEPEEPPTKYQISQPEVYVAAPGESLEVRCLLKDAAVISWTKDGVHLGPNNRTVLIGEYLQIKGATPRDSGLYACTASRTVDSETWYFMVNVTDAISSGDDEDDTDGAEDFVSENSNNKRAPYWTNTEKMEKRLHAVPAANTVKFRCPAGGNPMPTMRWLKNGKEFKQEHRIGGYKVRNQHWSLIMESVVPSDKGNYTCVVENEYGSINHTYHLDVVERSPHRPILQAGLPANASTVVGGDVEFVCKVYSDAQPHIQWIKHVEKNGSKYGPDGLPYLKVLKVLKAAGVNTTDKEIEVLYIRNVTFEDAGEYTCLAGNSIGISFHSAWLTVLPAPGREKEITASPDYLEIAIYCIGVFLIACMVVTVILCRMKNTTKKPDFSSQPAVHKLTKRIPLRRQVSAESSSSMNSNTPLVRITTRLSSTADTPMLAGVSEYELPEDPKWEFPRDKLTLGKPLGEGCFGQVVMAEAVGIDKDKPKEAVTVAVKMLKDDATEKDLSDLVSEMEMMKMIGKHKNIINLLGACTQDGPLYVIVEYASKGNLREYLRARRPPGMEYSYDINRVPEEQMTFKDLVSCTYQLARGMEYLASQKCIHRDLAARNVLVTENNVMKIADFGLARDINNIDYYKKTTNGRLPVKWMAPEALFDRVYTHQSDVWSFGVLMWEIFTLGGSPYPGIPVEELFKLLKEGHRMDKPANCTNELYMMMRDCWHAVPSQRPTFKQLVEDLDRILTLTTNEEYLDLSQPLEQYSPSYPDTRSSCSSGDDSVFSPDPMPYEPCLPQYPHINGSVKT

SEQ ID NO: 104 - protein, 768 aa, Homo sapiens
  fibroblast growth factor receptor 2 variant 6 (1)..(768): LocusID: 2263; NM_022973
MVSWGRFICLVVVTMATLSLARPSFSLVEDTTLEPEEPPTKYQISQPEVYVAAPGESLEVRCLLKDAAVISWTKDGVHLGPNNRTVLIGEYLQIKGATPRDSGLYACTASRTVDSETWYFMVNVTDAISSGDDEDDTDGAEDFVSENSNNKRAPYWTNTEKMEKRLHAVPAANTVKFRCPAGGNPMPTMRWLKNGKEFKQEHRIGGYKVRNQHWSLIMESVVPSDKGNYTCVVENEYGSINHTYHLDVVERSPHRPILQAGLPANASTVVGGDVEFVCKVYSDAQPHIQWIKHVEKNGSKYGPDGLPYLKVLKAAGVNTTDKEIEVLYIRNVTFEDAGEYTCLAGNSIGISFHSAWLTVLPAPGREKEITASPDYLEIAIYCIGVFLIACMVVTVILCRMKNTTKKPDFSSQPAVHKLTKRIPLRRQVTVSAESSSSMNSNTPLVRITTRLSSTADTPMLAGVSEYELPEDPKWEFPRDKLTLGKPLGEGCFGQVVMAEAVGIDKDKPKEAVTVAVKMLKDDATEKDLSDLVSEMEMMKMIGKHKNIINLLGACTQDGPLYVIVEYASKGNLREYLRARRPPGMEYSYDINRVPEEQMTFKDLVSCTYQLARGMEYLASQKCIHRDLAARNVLVTENNVMKIADFGLARDINNIDYYKKTTNGRLPVKWMAPEALFDRVYTHQSDVWSFGVLMWEIFTLGGSPYPGIPVEELFKLLKEGHRMDKPANCTNELYMMMRDCWHAVPSQRPTFKQLVEDLDRILTLTTNEI

SEQ ID NO: 105 - protein, 769 aa, Homo sapiens
  fibroblast growth factor receptor 2 variant 7 (1)..(769): LocusID: 2263; NM_022974
MVSWGRFICLVVVTMATLSLARPSFSLVEDTTLEPEEPPTKYQISQPEVYVAAPGESLEVRCLLKDAAVISWTKDGVHLGPNNRTVLIGEYLQIKGATPRDSGLYACTASRTVDSETWYFMVNVTDAISSGDDEDDTDGAEDFVSENSNNKRAPYWTNTEKMEKRLHAVPAANTVKFRCPAGGNPMPTMRWLKNGKEFKQEHRIGGYKVRNQHWSLIMESVVPSDKGNYTCVVENEYGSINHTYHLDVVERSPHRPILQAGLPANASTVVGGDVEFVCKVYSDAQPHIQWIKHVEKNGSKYGPDGLPYLKVLKHSGINSSNAEVLALFNVTEADAGEYICKVSNYIGQANQSAWLTVLPKQQAPGREKEITASPDYLEIAIYCIGVFLIACMVVTVILCRMKNTTKKPDFSSQPAVHKLTKRIPLRRQVTVSAESSSSMNSNTPLVRITTRLSSTADTPMLAGVSEYELPEDPKWEFPRDKLTLGKPLGEGCFGQVVMAEAVGIDKDKPKEAVTVAVKMLKDDATEKDLSDLVSEMEMMKMIGKHKNIINLLGACTQDGPLYVIVEYASKGNLREYLRARRPPGMEYSYDINRVPEEQMTFKDLVSCTYQLARGMEYLASQKCIHRDLAARNVLVTENNVMKIADFGLARDINNIDYYKKTTNGRLPVKWMAPEALFDRVYTHQSDVWSFGVLMWEIFTLGGSPYPGIPVEELFKLLKEGHRMDKPANCTNELYMMMRDCWHAVPSQRPTFKQLVEDLDRILTLTTNEI

SEQ ID NO: 106 - protein, 731 aa, Homo sapiens
  fibroblast growth factor receptor 2 variant 8 (1)..(731): LocusID: 2263; NM_022975
MVSWGRFICLVVVTMATLSLARPSFSLVEDTTLEPEDAISSGDDEDDTDGAEDFVSENSNNKRAPYWTNTEKMEKRLHAVPAANTVKFRCPAGGNPMPTMRWLKNGKEFKQEHRIGGYKVRNQHWSLIMESVVPSDKGNYTCVVENEYGSINHTYHLDVVERSPHRPILQAGLPANASTVVGGDVEFVCKVYSDAQPHIQWIKHVEKNGSKYGPDGLPYLKVLKHSGINSSNAEVLALFNVTEADAGEYICKVSNYIGQANQSAWLTVLPKQQAPGREKEITASPDYLEIAIYCIGVFLIACMVVTVILCRMKNTTKKPDFSSQPAVHKLTKRIPLRRQVSAESSSSMNSNTPLVRITTRLSSTADTPMLAGVSEYELPEDPKWEFPRDKLTLGKPLGEGCFGQVVMAEAVGIDKDKPKEAVTVAVKMLKDDATEKDLSDLVSEMEMMKMIGKHKNIINLLGACTQDGPLYVIVEYASKGNLREYLRARRPPGMEYSYDINRVPEEQMTFKDLVSCTYQLARGMEYLASQKCIHRDLAARNVLVTENNVMKIADFGLARDINNIDYYKKTTNGRLPVKWMAPEALFDRVYTHQSDVWSFGVLMWEIFTLGGSPYPGIPVEELFKLLKEGHRMDKPANCTNELYMMMRDCWHAVPSQRPTFKQLVEDLDRILTLTTNEEYLDLSQPLEQYSPSYPDTRSSCSSGDDSVFSPDPMPYEPCLPQYPHINGSVKT

SEQ ID NO: 107 - protein, 366 aa, Homo sapiens
  fibroblast growth factor receptor 2 variant 9 (1)..(366): LocusID: 2263; NM_022976
MVSWGRFICLVVVTMATLSLARPSFSLVEDTTLEPEEPPTKYQISQPEVYVAAPGESLEVRCLLKDAAVISWTKDGVHLGPNNRTVLIGEYLQIKGATPRDSGLYACTASRTVDSETWYFMVNVTDAISSGDDEDDTDGAEDFVSENSNNKRAPYWTNTEKMEKRLHAVPAANTVKFRCPAGGNPMPTMRWLKNGKEFKQEHRIGGYKVRNQHWSLIMESVVPSDKGNYTCVVENEYGSINHTYHLDVVERSPHRPILQAGLPANASTVVGGDVEFVCKVYSDAQPHIQWIKHVEKNGSKYGPDGLPYLKVLKHSGINSSNAEVLALFNVTEADAGEYICKVSNYIGQANQSAWLTVLPKQQGRRC

SEQ ID NO: 108 - protein, 788 aa, Homo sapiens
  fibroblast growth factor receptor 2 variant 10 (1)..(788): LocusID: 2263; NM_023028
MVSWGRFICLVVVTMATLSLARPSFSLVEDTTLEPEEPPTKYQISQPEVYVAAPGESLEVRCLLKDAAVISWTKDGVHLGPNNRTVLIGEYLQIKGATPRDSGLYACTASRTVDSETWYFMVNVTDAISSGDDEDDTDGAEDFVSENSNNKRAPYWTNTEKMEKRLHAVPAANTVKFRCPAGGNPMPTMRWLKNGKEFKQEHRIGGYKVRNQHWSLIMESVVPSDKGNYTCVVENEYGSINHTYHLDVVERSPHRPILQAGLPANASTVVGGDVEFVCKVYSDAQPHIQWIKHVEKNGSKYGPDGLPYLKVLKVLKAAGVNTTDKEIEVLYIRNVTFEDAGEYTCLAGNSIGISFHSAWLTVLPAPGREKEITASPDYLEIAIYCIGVFLIACMVVTVILCRMKNTTKKPDFSSQPAVHKLTKRIPLRRQVSAESSSSMNSNTPLVRITTRLSSTADTPMLAGVSEYELPEDPKWEFPRDKLTLGKPLGEGCFGQVVMAEAVGIDKDKPKEAVTVAVKMLKDDATEKDLSDLVSEMEMMKMIGKHKNIINLLGACTQDGPLYVIVEYASKGNLREYLRARRPPGMEYSYDINRVPEEQMTFKDLVSCTYQLARGMEYLASQKCIHRDLAARNVLVTENNVMKIADFGLARDINNIDYYKKTTNGRLPVKWMAPEALFDRVYTHQSDVWSFGVLMWEIFTLGGSPYPGIPVEELFKLLKEGHRMDKPANCTNELYMMMRDCWHAVPSQRPTFKQLVEDLDRILTLTTNEEYLDLSQPLEPYSPCYPDPR

SEQ ID NO: 109 - protein, 732 aa, Homo sapiens
  fibroblast growth factor receptor 2 variant 11 (1)..(732): LocusID: 2263; NM_023029
MVSWGRFICLVVVTMATLSLARPSFSLVEDTTLEPEDAISSGDDEDDTDGAEDFVSENSNNKRAPYWTNTEKMEKRLHAVPAANTVKFRCPAGGNPMPTMRWLKNGKEFKQEHRIGGYKVRNQHWSLIMESVVPSDKGNYTCVVENEYGSINHTYHLDVVERSPHRPILQAGLPANASTVVGGDVEFVCKVYSDAQPHIQWIKHVEKNGSKYGPDGLPYLKVLKAAGVNTTDKEIEVLYIRNVTFEDAGEYTCLAGNSIGISFHSAWLTVLPAPGREKEITASPDYLEIAIYCIGVFLIACMVVTVILCRMKNTTKKPDFSSQPAVHKLTKRIPLRRQVTVSAESSSSMNSNTPLVRITTRLSSTADTPMLAGVSEYELPEDPKWEFPRDKLTLGKPLGEGCFGQVVMAEAVGIDKDKPKEAVTVAVKMLKDDATEKDLSDLVSEMEMMKMIGKHKNIINLLGACTQDGPLYVIVEYASKGNLREYLRARRPPGMEYSYDINRVPEEQMTFKDLVSCTYQLARGMEYLASQKCIHRDLAARNVLVTENNVMKIADFGLARDINNIDYYKKTTNGRLPVKWMAPEALFDRVYTHQSDVWSFGVLMWEIFTLGGSPYPGIPVEELFKLLKEGHRMDKPANCTNELYMMMRDCWHAVPSQRPTFKQLVEDLDRILTLTTNEEYLDLSQPLEQYSPSYPDTRSSCSSGDDSVFSPDPMPYEPCLPQYPHINGSVKT

SEQ ID NO: 110 - protein, 707 aa, Homo sapiens
  fibroblast growth factor receptor 2 variant 12 (1)..(707): LocusID: 2263; NM_023030
MVSWGRFICLVVVTMATLSLARPSFSLVEDTTLEPEGAPYWTNTEKMEKRLHAVPAANTVKFRCPAGGNPMPTMRWLKNGKEFKQEHRIGGYKVRNQHWSLIMESVVPSDKGNYTCVVENEYGSINHTYHLDVVERSPHRPILQAGLPANASTVVGGDVEFVCKVYSDAQPHIQWIKHVEKNGSKYGPDGLPYLKVLKHSGINSSNAEVLALFNVTEADAGEYICKVSNYIGQANQSAWLTVLPKQQAPGREKEITASPDYLEIAIYCIGVFLIACMVVTVILCRMKNTTKKPDFSSQPAVHKLTKRIPLRRQVTVSAESSSSMNSNTPLVRITTRLSSTADTPMLAGVSEYELPEDPKWEFPRDKLTLGKPLGEGCFGQVVMAEAVGIDKDKPKEAVTVAVKMLKDDATEKDLSDLVSEMEMMKMIGKHKNIINLLGACTQDGPLYVIVEYASKGNLREYLRARRPPGMEYSYDINRVPEEQMTFKDLVSCTYQLARRMEYLASQKCIHRDLAARNVLVTENNVMKIADFGLARDINNIDYYKKTTNGRLPVKWMAPEALFDRVYTHQSDVWSFGVLMWEIFTLGGSPYPGIPVEELFKLLKEGHRMDKPANCTNELYMMMRDCWHAVPSQRPTFKQLVEDLDRILTLTTNEEYLDLSQPLEQYSPSYPDTRSSCSSGDDSVFSPDPMPYEPCLPQYPHINGSVKT

SEQ ID NO: 111 - protein, 705 aa, Homo sapiens
  fibroblast growth factor receptor 2 variant 13 (1)..(705): LocusID: 2263; NM_023031
MVSWGRFICLVVVTMATLSLARPSFSLVEDTTLEPEGAPYWTNTEKMEKRLHAVPAANTVKFRCPAGGNPMPTMRWLKNGKEFKQEHRIGGYKVRNQHWSLIMESVVPSDKGNYTCVVENEYGSINHTYHLDVVERSPHRPILQAGLPANASTVVGGDVEFVCKVYSDAQPHIQWIKHVEKNGSKYGPDGLPYLKVLKHSGINSSNAEVLALFNVTEADAGEYICKVSNYIGQANQSAWLTVLPKQQAPGREKEITASPDYLEIAIYCIGVFLIACMVVTVILCRMKNTTKKPDFSSQPAVHKLTKRIPLRRQVSAESSSSMNSNTPLVRITTRLSSTADTPMLAGVSEYELPEDPKWEFPRDKLTLGKPLGEGCFGQVVMAEAVGIDKDKPKEAVTVAVKMLKDDATEKDLSDLVSEMEMMKMIGKHKNIINLLGACTQDGPLYVIVEYASKGNLREYLRARRPPGMEYSYDINRVPEEQMTFKDLVSCTYQLARRMEYLASQKCIHRDLAARNVLVTENNVMKIADFGLARDINNIDYYKKTTNGRLPVKWMAPEALFDRVYTHQSDVWSFGVLMWEIFTLGGSPYPGIPVEELFKLLKEGHRMDKPANCTNELYMMMRDCWHAVPSQRPTFKQLVEDLDRILTLTTNEEYLDLSQPLEQYSPSYPDTRSSCSSGDDSVFSPDPMPYEPCLPQYPHINGSVKT

SEQ ID NO: 112 - protein, 461 aa, Homo sapiens
  tumor necrosis factor receptor superfamily, member 1B (1)..(461): LocusID: 7133; NM_001066
MAPVAVWAALAVGLELWAAAHALPAQVAFTPYAPEPGSTCRLREYYDQTAQMCCSKCSPGQHAKVFCTKTSDTVCDSCEDSTYTQLWNWVPECLSCGSRCSSDQVETQACTREQNRICTCRPGWYCALSKQEGCRLCAPLRKCRPGFGVARPGTETSDVVCKPCAPGTFSNTTSSTDICRPHQICNVVAIPGNASMDAVCTSTSPTRSMAPGAVHLPQPVSTRSQHTQPTPEPSTAPSTSFLLPMGPSPPAEGSTGDFALPVGLIVGVTALGLLIIGVVNCVIMTQVKKKPLCLQREAKVPHLPADKARGTQGPEQQHLLITAPSSSSSSLESSASALDRRAPTRNQPQAPGVEASGAGEARASTGSSDSSPGGHGTQVNVTCIVNVCSSSDHSSQCSSQASSTMGDTDSSPSESPKDEQVPFSKEECAFRSQLETPETLLGSTEEKPLPLGVPDAGMKPS

SEQ ID NO: 113 - protein, 281 aa, Homo sapiens [sequence omitted]

SEQ ID NO: 114 - protein, 498 aa, Homo sapiens
  angiopoietin 1 variant 1 (1)..(498): LocusID: 284; NM_001146
MTVFLSFAFLAAILTHIGCSNQRRSPENSGRRYNRIQHGQCAYTFILPEHDGNCRESTTDQYNTNALQRDAPHVEPDFSSQKLQHLEHVMENYTQWLQKLENYIVENMKSEMAQIQQNAVQNHTATMLEIGTSLLSQTAEQTRKLTDVETQVLNQTSRLEIQLLENSLSTYKLEKQLLQQTNEILKIHEKNSLLEHKILEMEGKHKEELDTLKEEKENLQGLVTRQTYIIQELEKQLNRATTNNSVLQKQQLELMDTVHNLVNLCTKEGVLLKGGKREEEKPFRDCADVYQAGFNKSGIYTIYINNMPEPKKVFCNMDVNGGGWTVIQHREDGSLDFQRGWKEYKMGFGNPSGEYWLGNEFIFAITSQRQYMLRIELMDWEGNRAYSQYDRFHIGNEKQNYRLYLKGHTGTAGKQSSLILHGADFSTKDADNDNCMCKCALMLTGGWWFDACGPSNLNGMFYTAGQNHGKLNGIKWHYFKGPSYSLRSTTMMIRPLDF

SEQ ID NO: 115 - protein, 402 aa, Homo sapiens
  angiopoietin 1 variant 2 (1)..(402): LocusID: 284; NM_139290
MTVFLSFAFLAAILTHIGCSNQRRSPENSGRRYNRIQHGQCAYTFILPEHDGNCRESTTDQYNTNALQRDAPHVEPDFSSQKLQHLEHVMENYTQWLQKLENYIVENMKSEMAQIQQNAVQNHTATMLEIGTSLLSQTAEQTRKLTDVETQVLNQTSRLEIQLLENSLSTYKLEKQLLQQTNEILKIHEKNSLLEHKILEMEGKHKEELDTLKEEKENLQGLVTRQTYIIQELEKQLNRATTNNSVLQKQQLELMDTVHNLVNLCTKEGVLLKGGKREEEKPFRDCADVYQAGFNKSGIYTIYINNMPEPKKVFCNMDVNGGGWTVIQHREDGSLDFQRGWKEYKMGFGNPSGEYWLGNEFIFAITSQRQYMLRIELMDWEGNRAYSQYDRFHIGNEKQNYR

SEQ ID NO: 116 - protein, 462 aa, Homo sapiens
  retinoid X receptor alpha (1)..(462): LocusID: 6256; NM_002957
MDTKHFLPLDFSTQVNSSLTSPTGRGSMAAPSLHPSLGPGIGSPGQLHSPISTLSSPINGMGPPFSVISSPMGPHSMSVPTTPTLGFSTGSPQLSSPMNPVSSSEDIKPPLGLNGVLKVPAHPSGNMASFTKHICAICGDRSSGKHYGVYSCEGCKGFFKRTVRKDLTYTCRDNKDCLIDKRQRNRCQYCRYQKCLAMGMKREAVQEERQRGKDRNENEVESTSSANEDMPVERILEAELAVEPKTETYVEANMGLNPSSPNDPVTNICQAADKQLFTLVEWAKRIPHFSELPLDDQVILLRAGWNELLIASFSHRSIAVKDGILLATGLHVHRNSAHSAGVGAIFDRVLTELVSKMRDMQMDKTELGCLRAIVLFNPDSKGLSNPAEVEALREKVYASLEAYCKHKYPEQPGRFAKLLLRLPALRSIGLKCLEHLFFFKLIGDTPIDTFLMEMLEAPHQMT

SEQ ID NO: 117 - protein, 323 aa, Homo sapiens
  degenerative spermatocyte homolog, lipid desaturase variant 1 (1)..(323): LocusID: 8560; NM_003676
MGSRVSREDFEWVYTDQPHADRRREILAKYPEIKSLMKPDPNLIWIIIMMVLTQLGAFYIVKDLDWKWVIFGAYAFGSCINHSMTLAIHEIAHNAAFGNCKAMWNRWFGMFANLPIGIPYSISFKRYHMDHHRYLGADGVDVDIPTDFEGWFFCTAFRKFIWVILQPLFYAFRPLFINPKPITYLEVINTVAQVTFDILIYYFLGIKSLVYMLAASLLGLGLHPISGHFIAEHYMFLKGHETYSYYGPLNLLTFNVGYHNEHHDFPNIPGKSLPLVRKIAAEYYDNLPHYNSWIKVLYDFVMDDTISPYSRMKRHQKGEMVLE

SEQ ID NO: 118 - protein, 323 aa, Homo sapiens; identical to SEQ ID NO: 117
  degenerative spermatocyte homolog, lipid desaturase variant 2 (1)..(323): LocusID: 8560; NM_144780

SEQ ID NO: 119 - protein, 511 aa, Homo sapiens
  solute carrier family 7 member 7 (1)..(511): LocusID: 9056; NM_003982
MVDSTEYEVASQPEVETSPLGDGASPGPEQVKLKKEISLLNGVCLIVGNMIGSGIFVSPKGVLIYSASFGLSLVIWAVGGLFSVFGALCYVELGTTIKKSGASYAYILEAFGGFLAFIRLWTSLLIIEPTSQAIIAITFANYMVQPLFPSCFAPYAASRLLAAACICLLTFINCAYVKWGTLVQDIFTYAKVLALIAVIVAGIVRLGQGASTHFENSFEGSSFAVGDIALALYSALFSYSGWDTLNYVTEEIKNPERNLPLSIGISMPIVTIIYILTNVAYYTVLDMRDILASDAVAVTFADQIFGIFNWIIPLSVALSCFGGLNASIVAASRLFFVGSREGHLPDAICMIHVERFTPVPSLLFNGIMALIYLCVEDIFQLINYYSFSYWFFVGLSIVGQLYLRWKEPDRPRPLKLSVFFPIVFCLCTIFLVAVPLYSDTINSLIGIAIALSGLPFYFLIIRVPEHKRPLYLRRIVGSATRYLQVLCMSVAAEMDLEDGGEMPKQRDPKSN

SEQ ID NO: 120 - protein, 737 aa, Homo sapiens
  procollagen-lysine, 2-oxoglutarate 5-dioxygenase variant 2 (1)..(737): LocusID: 5352; NM_000935
MGGCTVKPQLLLLALVLHPWNPCLGADSEKPSSIPTDKLLVITVATKESDGFHRFMQSAKYFNYTVKVLGQGEEWRGGDGINSIGGGQKVRLMKEVMEHYADQDDLVVMFTECFDVIFAGGPEEVLKKFQKANHKVVFAADGILWPDKRLADKYPVVHIGKRYLNSGGFIGYAPYVNRIVQQWNLQDNDDDQLFYTKVYIDPLKREAINITLDHKCKIFQTLNGAVDEVVLKFENGKARAKNTFYETLPVAINGNGPTKILLNYFGNYVPNSWTQDNGCTLCEFDTVDLSAVDVHPNVSIGVFIEQPTPFLPRFLDILLTLDYPKEALKLFIHNKEVYHEKDIKVFFDKAKHEIKTIKIVGPEENLSQAEARNMGMDFCRQDEKCDYYFSVDADVVLTNPRTLKILIEQNRKIIAPLVTRHGKLWSNFWGALSPDGYYARSEDYVDIVQGNRVGVWNVPYMANVYLIKGKTLRSEMNERNYFVRDKLDPDMALCRNAREMGVFMYISNRHEFGRLLSTANYNTSHYNNDLWQIFENPVDWKEKYINRDYSKIFTENIVEQPCPDVFWFPIFSEKACDELVEEMEHYGKWSGGKHHDSRISGGYENVPTDDIHMKQVDLENVWLDFIREFIAPVTLKVFAGYYTKGFALLNFVVKYSPERQRSLRPHHDASTFTINIALNNVGEDFQGGGCKFLRYNCSIESPRKGWSFMHPGRLTHLHEGLPVKNGTRYIAVSFIDP

SEQ ID NO: 121 - protein, 758 aa, Homo sapiens
  procollagen-lysine, 2-oxoglutarate 5-dioxygenase variant 1 (1)..(758): LocusID: 5352; NM_182943
MGGCTVKPQLLLLALVLHPWNPCLGADSEKPSSIPTDKLLVITVATKESDGFHRFMQSAKYFNYTVKVLGQGEEWRGGDGINSIGGGQKVRLMKEVMEHYADQDDLVVMFTECFDVIFAGGPEEVLKKFQKANHKVVFAADGILWPDKRLADKYPVVHIGKRYLNSGGFIGYAPYVNRIVQQWNLQDNDDDQLFYTKVYIDPLKREAINITLDHKCKIFQTLNGAVDEVVLKFENGKARAKNTFYETLPVAINGNGPTKILLNYFGNYVPNSWTQDNGCTLCEFDTVDLSAVDVHPNVSIGVFIEQPTPFLPRFLDILLTLDYPKEALKLFIHNKEVYHEKDIKVFFDKAKHEIKTIKIVGPEENLSQAEARNMGMDFCRQDEKCDYYFSVDADVVLTNPRTLKILIEQNRKIIAPLVTRHGKLWSNFWGALSPDGYYARSEDYVDIVQGNRVGVWNVPYMANVYLIKGKTLRSEMNERNYFVRDKLDPDMALCRNAREMTLQREKDSPTPETFQMLSPPKGVFMYISNRHEFGRLLSTANYNTSHYNNDLWQIFENPVDWKEKYINRDYSKIFTENIVEQPCPDVFWFPIFSEKACDELVEEMEHYGKWSGGKHHDSRISGGYENVPTDDIHMKQVDLENVWLHFIREFIAPVTLKVFAGYYTKGFALLNFVVKYSPERQRSLRPHHDASTFTINIALNNVGEDFQGGGCKFLRYNCSIESPRKGWSFMHPGRLTHLHEGLPVKNGTRYIAVSFIDP

SEQ ID NO: 122 - protein, 494 aa, Homo sapiens
  UDP-glucose dehydrogenase (1)..(494): LocusID: 7358; NM_003359
MFEIKKICCIGAGYVGGPTCSVIAHMCPEIRVTVVDVNESRINAWNSPTLPIYEPGLKEVVESCRGKNLFFSTNIDDAIKEADLVFISVNTPTKTYGMGKGRAADLKYIEACARRIVQNSNGYKIVTEKSTVPVRAAESIRRIFDANTKPNLNLQVLSNPEFLAEGTAIKDLKNPDRVLIGGDETPEGQRAVQALCAVYEHWVPREKILTTNTWSSELSKLAANAFLAQRISSINSISALCEATGADVEEVATAIGMDQRIGNKFLKASVGFGGSCFQKDVLNLVYLCEALNLPEVARYWQQVIDMNDYQRRRFASRIIDSLFNTVTDKKIAILGFAFKKDTGDTRESSSIYISKYLMDEGAHLHIYDPKVPREQIVVDLSHPGVSEDDQVSRLVTISKDPYEACDGAHAVVICTEWDMFKELDYERIHKKMLKPAFIFDGRRVLDGLHNELQTIGFQIETIGKKVSSKRIPYAPSGEIPKFSLQDPPNKKPKV

SEQ ID NO: 123 - protein, 416 aa, Homo sapiens
  phosphatidylinositol-4-phosphate 5-kinase, type II beta variant 1 (1)..(416): LocusID: 8396; NM_003559
MSSNCTSTTAVAVAPLSASKTKTKKKHFVCQKVKLFRASEPILSVLMWGVNHTINELSNVPVPVMLMPDDFKAYSKIKVDNHLFNKENLPSRFKFKEYCPMVFRNLRERFGIDDQDYQNSVTRSAPINSDSQGRCGTRFLTTYDRRFVIKTVSSEDVAEMHNILKKYHQFIVECHGNTLLPQFLGMYRLTVDGVETYMVVTRNVFSHRLTVHRKYDLKGSTVAREASDKEKAKDLPTFKDNDFLNEGQKLHVGEESKKNFLEKLKRDVEFLAQLKIMDYSLLVGIHDVDRAEQEEMEVEERAEDEECENDGVGGNLLCSYGTPPDSPGNLLSFPRFFGPGEFDPSVDVYAMKSHESSPKKEVYFMAIIDILTPYDTKKKAAHAAKTVKHGAGAEISTVNPEQYSKRFNEFMSNILT

SEQ ID NO: 124 - protein, 237 aa, Homo sapiens
  phosphatidylinositol-4-phosphate 5-kinase, type II, beta variant 2 (1)..(237): LocusID: 8396; NM_138687
VLMWGVNHTINELSNVPVPVMLMPDDFKAYSKIKVDNHLFNKENLPSRFKFKEYCPMVFRNLRERFGIDDQDYQNSVTRSAPINSDSQGRCGTRFLTTYDRRFVIKTVSSEDVAEMHNILKKYHQFIVECHGNTLLPQFLGMYRLTVDGVETYMVVTRNVFSHRLTVHRKYDLKGSTVAREASDKEKAKDLPTFKDNDFLNEGQKLHVGEESKKNFLEKLKRDVEEILVLSPGWRIA

SEQ ID NO: 125 - protein, 414 aa, Homo sapiens
  MAP kinase interacting serine/threonine kinase 2 sequence 1 (1)..(414): LocusID:2872; NM_017572
MVQKKPAELQGFHRSFKGQNPFELAFSLDQPDHGDSDFGLQCSARPDMPASQPIDIPDAKKRGKKKKRGRATDSFSGRFEDVYQLQEDVLGEGAHARVQTCINLITSQEYAVKIIEKQPGHIRSRVFREVEMLYQCQGHRNVLELIEFFEEEDRFYLVFEKMRGGSILSHIHKRRHFNELEASVVVQDVASALDFLHNKGIAHRDLKPENILCEHPNQVSPVKICDFDLGSGIKLNGDCSPISTPELLTPCGSAEYMAPEVVEAFSEEASIYDKRCDLWSLGVILYILLSGYPPFVGRCGSDCGWDRGEACPACQNMLFESIQEGKYEFPDKDWAHISCAAKDLISKLLVRDAKQRLSAAQVLQHPWVQGCAPENTLPTPMVLQRWDSHFLLPPHPCRIHVRPGGLVRTVTVNE

SEQ ID NO: 126 - protein, 465 aa, Homo sapiens
  MAP kinase interacting serine/threonine kinase 2 sequence 2 (1)..(465): LocusID: 2872; NM_199054
MVQKKPAELQGFHRSFKGQNPFELAFSLDQPDHGDSDFGLQCSARPDMPASQPIDIPDAKKRGKKKKRGRATDSFSGRFEDVYQLQEDVLGEGAHARVQTCINLITSQEYAVKIIEKQPGHIRSRVFREVEMLYQCQGHRNVLELIEFFEEEDRFYLVFEKMRGGSILSHIHKRRHFNELEASVVVQDVASALDFLHNKGIAHRDLKPENILCEHPNQVSPVKICDFDLGSGIKLNGDCSPISTPELLTPCGSAEYMAPEVVEAFSEEASIYDKRCDLWSLGVILYILLSGYPPFVGRCGSDCGWDRGEACPACQNMLFESIQEGKYEFPDKDWAHISCAAKDLISKLLVRDAKQRLSAAQVLQHPWVQGCAPENTLPTPMVLQRNSCAKDLTSFAAEAIAMNRQLAQHDEDLAEEEAAGQGQPVLVRATSRCLQLSPPSQSKLAQRRQRASLSSAPVVLVGDHA

SEQ ID NO: 127 - protein, 476 aa, Homo sapiens
  carboxypeptidase E (1)..(476): LocusID: 1363; NM_001873
MAGRGGSALLALCGALAACGWLLGAEAQEPGAPAAGMRRRRRLQQEDGISFEYHRYPELREALVSVWLQCTAISRIYTVGRSFEGRELLVIELSDNPGVHEPGEPEFKYIGNMHGNEAVGRELLIFLAQYLCNEYQKGNETIVNLIHSTRIHIMPSLNPDGFEKAASQPGELKDWFVGRSNAQGIDLNRNFPDLDRIVYVNEKEGGPNNHLLKNMKKIVDQNTKLAPETKAVIHWIMDIPFVLSANLHGGDLVANYPYDETRSGSAHEYSSSPDDAIFQSLARAYSSFNPAMSDPNRPPCRKNDDDSSFVDGTTNGGAWYSVPGGMQDFNYLSSNCFEITVELSCEKFPPEETLKTYWEDNKNSLISYLEQIHRGVKGFVRDLQGNPIANATISVEGIDHDVTSAKDGDYWRLLIPGNYKLTASAPGYLAITKKVAVPYSPAAGVDFELESFSERKEEEKEELMEWWKMMSETLNF

SEQ ID NO: 128 - protein, 417 aa, Homo sapiens
  carboxypeptidase A3 (1)..(417): LocusID: 1359; NM_001870
MRLILPVGLIATTLAIAPVRFDREKVFRVKPQDEKQADIIKDLAKTNELDFWYPGATHHVAANMMVDFRVSEKESQAIQSALDQNKMHYEILIHDLQEEIEKQFDVKEDIPGRHSYAKYNNWEKIVAWTEKMMDKYPEMVSRIKIGSTVEDNPLYVLKIGEKNERRKAIFMDCGIHAREWVSPAFCQWFVYQATKTYGRNKIMTKLLDRMNFYILPVFNVDGYIWSWTKNRMWRKNRSKNQNSKCIGTDLNRNFNASWNSIPNTNDPCADNYRGSAPESEKETKAVTNFIRSHLNEIKVYITFHSYSQMLLFPYGYTSKLPPNHEDLAKVAKIGTDVLSTRYETRYIYGPIESTIYPISGSSLDWAYDLGIKHTFAFELRDKGKFGFLLPESRIKPTCRETMLAVKFIAKYILKHTS

SEQ ID NO: 129 - protein, 456 aa, Homo sapiens
  solute carrier family 38, member 6 (1)..(456): LocusID: 145389; NM_153811
MEASWGSFNAERGWYVSVQQPEEAEAEELSPLLSNELHRQRSPGVSFGLSVFNLMNAIMGSGILGLAYVMANTGVFGFSFLLLTVALLASYSVHLLLSMCIQTAVTSYEDLGLFAFGLPGKLVVAGTIIIQNIGAMSSYLLIIKTELPAAIAEFLTGDYSRYWYLDGQTLLIIICVGIVFPLALLPKIGFLGYTSSLSFFFMMFFALVVIIKKWSIPCPLTLNYVEKGFQISNVTDDCKPKLFHFSKESAYALPTMAFSFLCHTSILPIYCELQSPSKKRMQNVTNTAIALSFLIYFISALFGYLTFYDKVESELLKGYSKYLSHDVVVMTVKLCILFAVLLTVPLIHFPARKAVTMMFFSNFPFSWIRHFLITLALNIIIVLLAIYVPDIRNVFGVVGASTSTCLIFIFPGLFYLKLSREDFLSWKKLGAFVLLIFGILVGNFSLALIIFDWINK

SEQ ID NO: 130 - protein, 873 aa, Homo sapiens
  very low density lipoprotein receptor (1)..(873): LocusID: 7436; NM_003383
MGTSALWAVWLLLALCWAPRESGATGTGRKAKCEPSQFQCTNGRCITLLWKCDGDEDCVDGSDEKNCVKKTCAESDFVCNNGQCVPSRWKCDGDPDCEDGSDESPEQCHMRTCRIHEISCGAHSTQCIPVSWRCDGENDCDSGEDEENCGNITCSPDEFTCSSGRCISRNFVCNGQDDCSDGSDELDCAPPTCGAHEFQCSTSSCIPISWVCDDDADCSDQSDESLEQCGRQPVIHTKCPASEIQCGSGECIHKKWRCDGDPDCKDGSDEVNCPSRTCRPDQFECEDGSCIHGSRQCNGIRDCVDGSDEVNCKNVNQCLGPGKFKCRSGECIDISKVCNQEQDCRDWSDEPLKECHINECLVNNGGCSHICKDLVIGYECDCAAGFELIDRKTCGDIDECQNPGICSQICINLKGGYKCECSRAYQMDLATGVCKAVGKEPSLIFTNRRDIRKIGLERKEYIQLVEQLRNTVALDADIAAQKLFWADLSQKAIFSASIDDKVGRHVKMIDNVYNPAAIAVDWVYKTIYWTDAASKTISVATLDGTKRKFLFNSDLREPASIAVDPLSGFVYWSDWGEPAKIEKAGMNGFDRRPLVTADIQWPNGITLDLIKSRLYWLDSKLHMLSSVDLNGQDRRIVLKSLEFLAHPLALTIFEDRVYWIDGENEAVYGANKFTGSEHATLVNNLNDAQDIIVYHELVQPSGKNWCEEDMENGGCEYLCLPAPQINDHSPKYTCSCPSGYNVEENGRDCQSTATTVTYSETKDTNTTEISATSGLVPGGINVTTAVSEVSVPPKGTSAAWAILPLLLLVMAAVGGYLMWRNWQHKNMKSMNFDNPVYLKTTEEDLSIDIGRHSASVGHTYPAISVVSTDDDLA

SEQ ID NO: 131 - protein, 255 aa, Homo sapiens
  cathepsin G (1)..(255): LocusID: 1511; NM_001911
MQPLLLLLAFLLPTGAEAGEIIGGRESRPHSRPYMAYLQIQSPAGQSRCGGFLVREDFVLTAAHCWGSNINVTLGAHNIQRRENTQQHITARRAIRHPQYNQRTIQNDIMLLQLSRRVRRNRNVNPVALPRAQEGLRPGTLCTVAGWGRVSMRRGTDTLREVQLRVQRDRQCLRIFGSYDPRRQICVGDRRERKAAFKGDSGGPLLCNNVAHGIVSYGKSSGVPPEVFTRVSSFLPWIRTTMRSFKLLDQMETPL

SEQ ID NO: 132 - protein, 447 aa, Homo sapiens
  galactokinase 2 variant 2 (1)..(447): LocusID: 2585; NM_001001556
MPVLYDRLLKLKEMFNSKFGSIPKFYVRAPGRVNIIGEHIDYCGYSVLPMAVEQDVLIAVEPVKTYALQLANTNPLYPDFSTSANNIQIDKTKPLWHNYFLCGLKGIQEHFGLSNLTGMNCLVDGNIPPSSGLSSSSALVCCAGLVTLTVLGRNLSKVELAEICAKSERYIGTEGGGMDQSISFLAEEGTAKLIEFSPLRATDVKLPSGAVFVIANSCVEMNKAATSHFNIRVMECRLAAKLLAKYKSLQWDKVLRLEEVQAKLGISLEEMLLVTEDALHPEPYNPEEICRCLGISLEELRTQILSPNTQDVLIFKLYQRAKHVYSEAARVLQFKKICEEAPENMVQLLGELMNQSHMSCRDMYECSCPELDQLVDICRKFGAQGSRLTGAGWGGCTVSMVPADKLPSFLANVHKAYYQRSDGSLAPEKQSLFATKPGGGALVLLEA

SEQ ID NO: 133 - protein, 458 aa, Homo sapiens
  galactokinase 2 variant 1 (1)..(458): LocusID: 2585; NM_002044
MATESPATRRVQVAEHPRLLKLKEMFNSKFGSIPKFYVRAPGRVNIIGEHIDYCGYSVLPMAVEQDVLIAVEPVKTYALQLANTNPLYPDFSTSANNIQIDKTKPLWHNYFLCGLKGIQEHFGLSNLTGMNCLVDGNIPPSSGLSSSSALVCCAGLVTLTVLGRNLSKVELAEICAKSERYIGTEGGGMDQSISFLAEEGTAKLIEFSPLRATDVKLPSGAVFVIANSCVEMNKAATSHFNIRVMECRLAAKLLAKYKSLQWDKVLRLEEVQAKLGISLEEMLLVTEDALHPEPYNPEEICRCLGISLEELRTQILSPNTQDVLIFKLYQRAKHVYSEAARVLQFKKICEEAPENMVQLLGELMNQSHMSCRDMYECSCPELDQLVDICRKFGAQGSRLTGAGWGGCTVSMVPADKLPSFLANVHKAYYQRSDGSLAPEKQSLFATKPGGGALVLLEA

SEQ ID NO: 134 - protein, 190 aa, Homo sapiens
  prostaglandin D2 synthase (1)..(190): LocusID: 5730; NM_000954
MATHHTLWMGLALLGVLGDLQAAPEAQVSVQPNFQQDKFLGRWFSAGLASNSSWLREKKAALSMCKSVVAPATDGGLNLTSTFLRKNQCETRTMLLQPAGSLGSYSYRSPHWGSTYSVSVVETDYDQYALLYSQGSKGPGEDFRMATLYSRTQTPRAELKEKFTAFCKAQGFTEDTIVFLPQTDKCMTEQ

SEQ ID NO: 135 - protein, 424 aa, Homo sapiens
  mitogen-activated protein kinase 9 variant 1 (1)..(424): LocusID: 5601; NM_002752
MSDSKCDSQFYSVQVADSTFTVLKRYQQLKPIGSGAQGIVCAAFDTVLGINVAVKKLSRPFQNQTHAKRAYRELVLLKCVNHKNIISLLNVFTPQKTLEEFQDVYLVMELMDANLCQVIHMELDHERMSYLLYQMLCGIKHLHSAGIIHRDLKPSNIVVKSDCTLKILDFGLARTACTNFMMTPYVVTRYYRAPEVILGMGYKENVDIWSVGCIMGELVKGCVIFQGTDHIDQWNKVIEQLGTPSAEFMKKLQPTVRNYVENRPKYPGIKFEELFPDWIFPSESERDKIKTSQARDLLSKMLVIDPDKRISVDEALRHPYITVWYDPAEAEAPPPQIYDAQLEEREHAIEEWKELIYKEVMDWEERSKNGVVKDQPSDAAVSSNATPSQSSSINDISSMSTEQTLASDTDSSLDASTGPLEGCR

SEQ ID NO: 136 - protein, 382 aa, Homo sapiens
  mitogen-activated protein kinase 9 variant 2 (1)..(382): LocusID: 5601; NM_139068
MSDSKCDSQFYSVQVADSTFTVLKRYQQLKPIGSGAQGIVCAAFDTVLGINVAVKKLSRPFQNQTHAKRAYRELVLLKCVNHKNIISLLNVFTPQKTLEEFQDVYLVMELMDANLCQVIHMELDHERMSYLLYQMLCGIKHLHSAGIIHRDLKPSNIVVKSDCTLKILDFGLARTACTNFMMTPYVVTRYYRAPEVILGMGYKENVDIWSVGCIMGELVKGCVIFQGTDHIDQWNKVIEQLGTPSAEFMKKLQPTVRNYVENRPKYPGIKFEELFPDWIFPSESERDKIKTSQARDLLSKMLVIDPDKRISVDEALRHPYITVWYDPAEAEAPPPQIYDAQLEEREHAIEEWKELIYKEVMDWEERSKNGVVKDQPSAQMQQ

SEQ ID NO: 137 - protein, 382 aa, Homo sapiens
  mitogen-activated protein kinase 9 variant 3 (1)..(382): LocusID: 5601; NM_139069
MSDSKCDSQFYSVQVADSTFTVLKRYQQLKPIGSGAQGIVCAAFDTVLGINVAVKKLSRPFQNQTHAKRAYRELVLLKCVNHKNIISLLNVFTPQKTLEEFQDVYLVMELMDANLCQVIHMELDHERMSYLLYQMLCGIKHLHSAGIIHRDLKPSNIVVKSDCTLKILDFGLARTACTNFMMTPYVVTRYYRAPEVILGMGYKENVDIWSVGCIMAEMVLHKVLFPGRDYIDQWNKVIEQLGTPSAEFMKKLQPTVRNYVENRPKYPGIKFEELFPDWIFPSESERDKIKTSQARDLLSKMLVIDPDKRISVDEALRHPYITVWYDPAEAEAPPPQIYDAQLEEREHAIEEWKELIYKEVMDWEERSKNGVVKDQPSAQMQQ

SEQ ID NO: 138 - protein, 424 aa, Homo sapiens
  mitogen-activated protein kinase 9 variant 4 (1)..(424): LocusID: 5601; NM_139070
MSDSKCDSQFYSVQVADSTFTVLKRYQQLKPIGSGAQGIVCAAFDTVLGINVAVKKLSRPFQNQTHAKRAYRELVLLKCVNHKNIISLLNVFTPQKTLEEFQDVYLVMELMDANLCQVIHMELDHERMSYLLYQMLCGIKHLHSAGIIHRDLKPSNIVVKSDCTLKILDFGLARTACTNFMMTPYVVTRYYRAPEVILGMGYKENVDIWSVGCIMAEMVLHKVLFPGRDYIDQWNKVIEQLGTPSAEFMKKLQPTVRNYVENRPKYPGIKFEELFPDWIFPSESERDKIKTSQARDLLSKMLVIDPDKRISVDEALRHPYITVWYDPAEAEAPPPQIYDAQLEEREHAIEEWKELIYKEVMDWEERSKNGVVKDQPSDAAVSSNATPSQSSSINDISSMSTEQTLASDTDSSLDASTGPLEGCR

SEQ ID NO: 139 - protein, 162 aa, Homo sapiens
  interleukin 15 variant 3 (1)..(162): LocusID: 3600; NM_000585
MRISKPHLRSISIQCYLCLLLNSHFLTEAGIHVFILGCFSAGLPKTEANWVNVISDLKKIEDLIQSMHIDATLYTESDVHPSCKVTAMKCFLLELQVISLESGDASIHDTVENLIILANNSLSSNGNVTESGCKECEELEEKNIKEFLQSFVHIVQMFINTS

SEQ ID NO: 140 - protein, 162 aa, Homo sapiens; identical to SEQ ID NO: 139
  interleukin 15 variant 1 (1)..(162): LocusID: 3600; NM_172174

SEQ ID NO: 141 - protein, 135 aa, Homo sapiens
  interleukin 15 variant 2 (1)..(135): LocusID: 3600; NM_172175
MVLGTIDLCSCFSAGLPKTEANWVNVISDLKKIEDLIQSMHIDATLYTESDVHPSCKVTAMKCFLLELQVISLESGDASIHDTVENLIILANNSLSSNGNVTESGCKECEELEEKNIKEFLQSFVHIVQMFINTS

SEQ ID NO: 142 - protein, 824 aa, Homo sapiens
  mucosa associated lymphoid tissue lymphoma translocation gene 1 variant 1 (1)..(824): LocusID: 10892; NM_006785
MSLLGDPLQALPPSAAPTGPLLAPPAGATLNRLREPLLRRLSELLDQAPEGRGWRRLAELAGSRGRLRLSCLDLEQCSLKVLEPEGSPSLCLLKLMGEKGCTVTELSDFLQAMEHTEVLQLLSPPGIKITVNPESKAVLAGQFVKLCCRATGHPFVQYQWFKMNKEIPNGNTSELIFNAVHVKDAGFYVCRVNNNFTFEFSQWSQLDVCDIPESFQRSVDGVSESKLQICVEPTSQKLMPGSTLVLQCVAVGSPIPHYQWFKNELPLTHETKKLYMVPYVDLEHQGTYWCHVYNDRDSQDSKKVEIIIGRTDEAVECTEDELNNLGHPDNKEQTTDQPLAKDKVALLIGNMNYREHPKLKAPLVDVYELTNLLRQLDFKVVSLLDLTEYEMRNAVDEFLLLLDKGVYGLLYYAGHGYENFGNSFMVPVDAPNPYRSENCLCVQNILKLMQEKETGLNVFLLDMCRKRNDYDDTIPILDALKVTANIVFGYATCQGAEAFEIQHSGLANGIFMKFLKDRLLEDKKITVLLDEVAEDMGKCHLTKGKQALEIRSSLSEKRALTDPIQGTEYSAESLVRNLQWAKAHELPESMCLKFDCGVQIQLGFAAEFSNVMIIYTSIVYKPPEIIMCDAYVTDFPLDLDIDPKDANKGTPEETGSYLVSKDLPKHCLYTRLSSLQKLKEHLVFTVCLSYQYSGLEDTVEDKQEVNVGKPLIAKLDMHRGLGRKTCFQTCLMSNGPYQSSAATSGGAGHYHSLQDPFHGVYHSHPGNPSNVTPADSCHCSRTPDAFISSFAHHASCHFSRSNVPVETTDEIPFSFSDRLRISEK

SEQ ID NO: 143 - protein, 813 aa, Homo sapiens
  mucosa associated lymphoid tissue lymphoma translocation gene 1 variant 2 (1)..(813): LocusID: 10892; NM_173844
MSLLGDPLQALPPSAAPTGPLLAPPAGATLNRLREPLLRRLSELLDQAPEGRGWRRLAELAGSRGRLRLSCLDLEQCSLKVLEPEGSPSLCLLKLMGEKGCTVTELSDFLQAMEHTEVLQLLSPPGIKITVNPESKAVLAGQFVKLCCRATGHPFVQYQWFKMNKEIPNGNTSELIFNAVHVKDAGFYVCRVNNNFTFEFSQWSQLDVCDIPESFQRSVDGVSESKLQICVEPTSQKLMPGSTLVLQCVAVGSPIPHYQWFKNELPLTHETKKLYMVPYVDLEHQGTYWCHVYNDRDSQDSKKVEIIIDELNNLGHPDNKEQTTDQPLAKDKVALLIGNMNYREHPKLKAPLVDVYELTNLLRQLDFKVVSLLDLTEYEMRNAVDEFLLLLDKGVYGLLYYAGHGYENFGNSFMVPVDAPNPYRSENCLCVQNILKLMQEKETGLNVFLLDMCRKRNDYDDTIPILDALKVTANIVFGYATCQGAEAFEIQHSGLANGIFMKFLKDRLLEDKKITVLLDEVAEDMGKCHLTKGKQALEIRSSLSEKRALTDPIQGTEYSAESLVRNLQWAKAHELPESMCLKFDCGVQIQLGFAAEFSNVMIIYTSIVYKPPEIIMCDAYVTDFPLDLDIDPKDANKGTPEETGSYLVSKDLPKHCLYTRLSSLQKLKEHLVFTVCLSYQYSGLEDTVEDKQEVNVGKPLIAKLDMHRGLGRKTCFQTCLMSNGPYQSSAATSGGAGHYHSLQDPFHGVYHSHPGNPSNVTPADSCHCSRTPDAFISSFAHHASCHFSRSNVPVETTDEIPFSFSDRLRISEK

SEQ ID NO: 144 - protein, 417 aa, Homo sapiens
  lysyl oxidase (1)..(417): LocusID: 4015; NM_002317
MRFAWTVLLLGPLQLCALVHCAPPAAGQQQPPREPPAAPGAWRQQIQWENNGQVFSLLSLGSQYQPQRRRDPGAAVPGAANASAQQPRTPILLIRDNRTAAARTRTAGSSGVTAGRPRPTARHWFQAGYSTSRAREAGASRAENQTAPGEVPALSNLRPPSRVDGMVGDDPYNPYKYSDDNPYYNYYDTYERPRPGGRYRPGYGTGYFQYGLPDLVADPYYIQASTYVQKMSMYNLRCAAEENCLASTAYRADVRDYDHRVLLRFPQRVKNQGTSDFLPSRPRYSWEWHSCHQHYHSMDEFSHYDLLDANTQRRVAEGHKASFCLEDTSCDYGYHRRFACTAHTQGLSPGCYDTYGADIDCQWIDITDVKPGNYILKVSVNPSYLVPESDYTNNVVRCDIRYTGHHAYASGCTISPY

SEQ ID NO: 145 - protein, 799 aa, Homo sapiens
  integrin, beta 5 (1)..(799): LocusID: 3693; NM_002213
MPRAPAPLYACLLGLCALLPRLAGLNICTSGSATSCEECLLIHPKCAWCSKEDFGSPRSITSRCDLRANLVKNGCGGEIESPASSFHVLRSLPLSSKGSGSAGWDVIQMTPQEIAVNLRPGDKTTFQLQVRQVEDYPVDLYYLMDLSLSMKDDLDNIRSLGTKLAEEMRKLTSNFRLGFGSFVDKDISPFSYTAPRYQTNPCIGYKLFPNCVPSFGFRHLLPLTDRVDSFNEEVRKQRVSRNRDAPEGGFDAVLQAAVCKEKIGWRKDALHLLVFTTDDVPHIALDGKLGGLVQPHDGQCHLNEANEYTASNQMDYPSLALLGEKLAENNINLIFAVTKNHYMLYKNFTALIPGTTVEILDGDSKNIIQLIINAYNSIRSKVELSVWDQPEDLNLFFTATCQDGVSYPGQRKCEGLKIGDTASFEVSLEARSCPSRHTEHVFALRPVGFRDSLEVGVTYNCTCGCSVGLEPNSARCNGSGTYVCGLCECSPGYLGTRCECQDGENQSVYQNLCREAEGKPLCSGRGDCSCNQCSCFESEFGKIYGPFCECDNFSCARNKGVLCSGHGECHCGECKCHAGYIGDNCNCSTDISTCRGRDGQICSERGHCLCGQCQCTEPGAFGEMCEKCPTCPDACSTKRDCVECLLLHSGKPDNQTCHSLCRDEVITWVDTIVKDDQEAVLCFYKTAKDCVMMFTYVELPSGKSNLTVLREPECGNTPNAMTILLAVVGSILLVGLALLAIWKLLVTIHDRREFAKFQSERSRARYEMASNPLYRKPISTHTVDFTFNKFNKSYNGTVD

SEQ ID NO: 146 - protein, 485 aa, Homo sapiens
  aldehyde dehydrogenase 3 family, member A2 (1)..(485): LocusID: 224; NM_000382
MELEVRRVRQAFLSGRSRPLRFRLQQLEALRRMVQEREKDILTAIAADLCKSEFNVYSQEVITVLGEIDFMLENLPEWVTAKPVKKNVLTMLDEAYIQPQPLGVVLIIGAWNYPFVLTIQPLIGAIAAGNAVIIKPSELSENTAKILAKLLPQYLDQDLYIVINGGVEETTELLKQRFDHIFYTGNTAVGKIVMEAAAKHLTPVTLELGGKSPCYIDKDCDLDIVCRRITWGKYMNCGQTCIAPDYILCEASLQNQIVWKIKETVKEFYGENIKESPDYERIINLRHFKRILSLLEGQKIAFGGETDEATRYIAPTVLTDVDPKTKVMQEEIFGPILPIVPVKNVDEAINFINEREKPLALYVFSHNHKLIKRMIDETSSGGVTGNDVIMHFTLNSFPFGGVGSSGMGAYHGKHSFDTFSHQRPCLLKSLKREGANKLRYPPNSQSKVDWGKFFLLKRFNKEKLGLLLLTFLGIVAAVLVKAEYY

1. A method of screening for compounds that reduce and/or prevent obesity comprising
a) contacting a cell expressing a gene selected from the group consisting of Seq. ID Nos. 1-6 with a compound;
b) measuring the expression of said gene, or the expression of a polypeptide encoded by said gene; and
c) determining whether the compound up-regulates the expression of said gene or of the polypeptide encoded by said gene.

2. The method of claim 1, wherein the gene is Seq. ID No. 1.

3. The method of claim 1, wherein the gene is Seq. ID No. 2.

4. The method of claim 1, wherein the gene is Seq. ID No. 3.

5. The method of claim 1, wherein the gene is Seq. ID No. 4.

6. The method of claim 1, wherein the gene is Seq. ID No. 5.

7. The method of claim 1, wherein the gene is Seq. ID No. 6.

8. A method of screening for compounds that reduce and/or prevent obesity comprising
a) contacting a cell expressing a gene selected from the group consisting of Seq ID No. 25-37 with a compound;
b) measuring the expression of said gene, or the expression of a polypeptide encoded by said gene; and
c) determining whether the compound up-regulates the expression of said gene or of the polypeptide encoded by said gene.

9. A method of screening for compounds that reduce and/or prevent obesity comprising
a) contacting a cell expressing a gene selected from the group consisting of Seq. ID Nos. 7-12 with a compound;
b) measuring the expression of said gene, or the expression of a polypeptide encoded by said gene; and
c) determining whether the compound down-regulates the expression of said gene or of a polypeptide encoded by said gene.

10. The method of claim 8, wherein the gene is Seq. ID No. 7.

11. The method of claim 8, wherein the gene is Seq. ID No. 8.

12. The method of claim 8, wherein the gene is Seq. ID No. 9.

13. The method of claim 8, wherein the gene is Seq. ID No. 10.

14. The method of claim 8, wherein the gene is Seq. ID No. 11.

15. The method of claim 8, wherein the gene is Seq. ID No. 12.

16. A method of screening for compounds that reduce and/or prevent obesity comprising
a) contacting a cell expressing a gene selected from the group consisting of Seq ID No. 38 to 85 with a compound;
b) measuring the expression of said gene, or the expression of a polypeptide encoded by said gene; and
c) determining whether the compound down-regulates the expression of said gene or of a polypeptide encoded by said gene.

17. A method of screening for compounds that reduce and/or prevent obesity comprising: a) contacting a polypeptide selected from the group consisting of Seq ID No. 13 to 18 with a compound; and
b) determining the activity of said polypeptide;
wherein a compound which reduces and/or prevents obesity by agonizing said polypeptide is a compound which causes an increase in activity of said polypeptide.

18. A method of screening for compounds that reduce and/or prevent obesity comprising: a) contacting a polypeptide selected from the group consisting of Seq ID No. 86 to 98 with a compound; and
b) determining the activity of said polypeptide;
wherein a compound which reduces and/or prevents obesity by agonizing said polypeptide is a compound which causes an increase in activity of said polypeptide.

19. A method of screening for compounds that reduce and/or prevent obesity comprising: a) contacting a polypeptide selected from the group consisting of Seq ID No. 19 to 24 with a compound; and
b) determining the activity of said polypeptide;
wherein a compound which reduces and/or prevents obesity by antagonizing said polypeptide is a compound which causes a decrease in activity of said polypeptide.

20. A method of screening for compounds that reduce and/or prevent obesity comprising: a) contacting a polypeptide selected from the group consisting of Seq ID No. 99 to 146 with a compound; and
b) determining the activity of said polypeptide;
wherein a compound which reduces and/or prevents obesity by antagonizing said polypeptide is a compound which causes a decrease in activity of said polypeptide.

21. A method for screening of compounds that reduce and/or prevent obesity comprising: a) contacting a cell expressing a nucleic acid encoding a polypeptide selected from the group consisting of Seq ID No. 13 to 18 with a compound; and
b) determining the activity of said polypeptide;
wherein a compound which reduces and/or prevents obesity by agonizing said polypeptide is a compound which causes an increase in activity of said polypeptide.

22. A method for screening of compounds that reduce and/or prevent obesity comprising: a) contacting a cell expressing a nucleic acid encoding a polypeptide selected from the group consisting of Seq ID No.86 to 98 with a compound; and
b) determining the activity of said polypeptide;
wherein a compound which reduces and/or prevents obesity by agonizing said polypeptide is a compound which causes an increase in activity of said polypeptide.

23. A method for screening of compounds that reduce and/or prevent obesity comprising: a) contacting a cell expressing a nucleic acid encoding a polypeptide selected from the group consisting of Seq ID No. 19 to 24 with a compound; and
b) determining the activity of said polypeptide;
wherein a compound which reduces and/or prevents obesity by antagonizing said polypeptide is a compound which causes a decrease in activity of said polypeptide.

24. A method for screening of compounds that reduce and/or prevent obesity comprising: a) contacting a cell expressing a nucleic acid encoding a polypeptide selected from the group consisting of Seq ID No. 99 to 146 with a compound; and
b) determining the activity of said polypeptide;
wherein a compound which reduces and/or prevents obesity by antagonizing said polypeptide is a compound which causes a decrease in activity of said polypeptide.

25. A method of screening for compounds that bind to a polypeptide selected from the group consisting of the polypeptides of Seq ID No. 13 to 24, comprising the steps of
a) contacting a compound with said polypeptide; and
b) determining the ability of said compound to bind to said polypeptide.

26. A method of screening for compounds that bind to a polypeptide selected from the group consisting of the polypeptides of Seq ID No.86 to 146, comprising the steps of
a) contacting a compound with said polypeptide; and
b) determining the ability of said compound to bind to said polypeptide.

34. A pharmaceutical composition for the modulation of body weight, comprising a compound that modulates the expression or activity of a polypeptide selected from the group consisting of Seq ID No. 13 to 24, mixed with a pharmaceutically acceptable carrier.

35. A pharmaceutical composition for the modulation of body weight, comprising a compound that modulates the expression or activity of a polypeptide selected from the group consisting of Seq ID No. 86 to 146, mixed with a pharmaceutically acceptable carrier.
